(19) United States
(12) Patent Application Publication
(10) Pub. No.: US 2009/0221039 A1
(43) Pub. Date: Sep. 3, 2009

(54) FUSION PROTEINS BETWEEN PLANT CELL-WALL DEGRADING ENZYMES AND A SWOLLENIN, AND THEIR USES

(75) Inventors: Eric Record, Marseille (FR); Anthony Levasseur, Aubagne (FR); Markku Soloheimo, Helsinki (FI); David Navarro, Marseille (FR); Martina Andgerg-Blomster, Fin-Kirkkonummi (FI); Frederic Monot, Nanterre (FR); Tiina Nakari-Setala, Espoo (FI); Marcel Asther, La Ciotat (FR)

Correspondence Address: YOUNG & THOMPSON, 209 Madison Street, Suite 500, ALEXANDRIA, VA, 22314, US

(73) Assignees: Institut Francias Du Petrole, Rueil-Malmaison (FR); VTT Technical Research Centre of Finland, Espoo (FI); Institute National De La Recherche Agronomique, Paris (FR); Universite De Provence, Marseille (FR)

(21) Appl. No.: 12/295,870

(22) PCT Filed: Apr. 2, 2007
(86) PCT No.: PCT/EP2007/002947

§ 371 Date: May 7, 2009

(30) Foreign Application Priority Data
Apr. 6, 2006 (EP) 06290562.5

(51) Int. Cl. C12P 21/04; C12N 9/14; C12N 9/42; C12N 1/15; C12N 15/63; A62D 3/02; C12S 3/00; C07H 21/04

(52) U.S. Cl. 435/69.7; 435/195; 435/209; 435/254.11; 435/254.3; 435/254.6; 435/320.1; 435/262.5; 435/267; 536/23.2

(57) ABSTRACT

The invention relates to fusion proteins including at least a swollenin and at least a plant cell-wall degrading enzyme, the swollenin, and plant cell-wall degrading enzyme, being recombinant proteins corresponding to native proteins in fungi, or mutated forms thereof. The invention also relates to the use of fusion proteins as defined above, for carrying out processes of plant cell-wall degradation in the frame of the preparation, from plants or vegetal by-products, of compounds of interest located in plant cell-wall, or in the frame of the bleaching of pulp and paper, or for biofuel production, or food industries.

[0001] The invention relates to the construction and overproduction of engineered multifunctional fusion proteins between at least a swollenin and at least a plant cell-wall degrading enzyme, and to their uses as improved enzymatic tools for valorisation of agricultural by-products.

### BACKGROUND OF THE INVENTION

[0002] The plant cell wall has developed a complex architecture with an intrinsic composition of diverse carbohydrates in order to protect the cell from microbial attacks. As the consequence, plant cell wall-degrading micro-organisms have designed several enzymatic systems to break down the plant biomass and to finally assimilate the sugar substrates. Among bacterial and fungal micro-organisms, modular enzymes are found containing Carbohydrate-Binding Modules (CBMs) that assist enzymes for substrate targeting. Recently, a new kind of proteins, involved in the plant cell wall disruption, was identified in Trichoderma reesei and named swollenin (Saloheimo M. et al. 2002). This protein presents high similarity with plant expansins that breakdown hydrogen bounds between cellulose microfibrils or cellulose and other cell wall polymers (Cosgrove 2000). Indeed, plant expansins are thought to play a role in the cell wall extension and are considered as a key endogenous regulator for the cell wall growth of the plant (Li Y et al. 2003). In contrast to plant expansins, the swollenin has a bi-modular structure composed of a CBM connected by a linker region to the plant expansin homologous domain. This modular structure is typical of fungal cellulases and some hemicellulases that present a CBM to target the enzymatic module. In the specific case of the swollenin, there is no associated hydrolytic activity but an expansin module with cell wall disruption capacity. In parallel, micro-organisms cell has developed free systems that do not possess a CBM module but are secreted in large quantities in the extracellular medium. These kinds of enzymes are found among cellulases, hemicellulases and pectinases. Genetic engineering studies have focused on the improvement of free enzymes by associating a CBM module to target enzymes to a specific plant substrate such as cellulose (Ito et al. 2004; Limón et al. 2004). In the first case, Ito et al. demonstrated that the hydrolytic activity of a T. reesei endoglucanase was increased with the number of CBM added to the enzyme. In the second work, a COM module was genetically fused to a non-cellulase enzyme, the Trichoderma harzanium chitinase, and results showed that both chitinase and antifungal activities increased with increasing binding capacity to cellulose. This performance gain is of great interest for industrial applications where the plant cell wall degradation is a key-point, i.e. in the biofuel and in the pulp and paper sectors.

[0003] Recently, the inventors became interested in cinnamoyl esterases that are able to hydrolyse different kinds of sugar ester-linked hydroxycinnamic acids. These enzymes were classified on the basis of substrate specificity and primary sequence identity (Crepin et al. 2003). The first cinnamoyl esterases to be fully characterized belong to Aspergillus niger. The feruloyl esterase (FAEIII, type A) was described to be preferentially active against methyl ester of ferulic and sinapic acids (Faulds and Williamson 1994), while the cinnamoyl esterase showed a preference for the methyl ester of caffeic and p-coumaric acids (Kroon et al. 1996). Both encoding genes were cloned and characterized. They were overexpressed in Pichia pastoris and A. niger to yield sufficient quantities of recombinant proteins and enable their utilisation in industrial applications (Juge et al. 2001; Record et al. 2003, Levasseur et al. 2003). The feruloyl esterase was evaluated for wheat straw and flax pulp bleaching and demonstrated to improve, in combination with a laccase treatment, the decrease of the final lignin content (Record et al. 2003; Sigoillot et al; 2005). Indeed, the feruloyl esterase is known to hydrolyse feruloylated oligosaccharides but also diferulate cross-links found in hemicellulose and pectin (Williamson et al. 1998; Saulnier and Thibault 1999), facilitating the access of other ligno-cellulolytic enzymes.

[0004] The aim of the present work is to develop new enzymatic tools to degrade plant biomass or to biotransform plant cell wall components. Two strategies were developed in parallel. In a previous work (Levasseur et al. 2004), the goal was to design a new kind of fungal enzyme fused to a bacterial dockerin and therefore able to be incorporated in cellulosome from Clostridium thermocellium. Indeed, bacterial cellulosome is a very effective system for increasing the synergistic effect of enzymes (Ciruela et al. 1998, Fierobe et al. 2002). In an alternative way, chimerical enzymes associating two enzymes were shown to be very effective to degrade the plant biomass and especially if a CBM module was integrated in the enzymatic complex (Levasseur et al 2005). In other works, the fusion of CBM modules to enzymatic partners was reported to be a good way to improve the efficiency of the enzymatic partner by assisting the enzyme targeting to the substrate and increasing the local concentration of the enzymes (Cages et al. 1997, Boraston et al. 2004).) In addition, only a few CBMs were reported to mediate non-catalytic disruption effect of the crystalline structure of the cellulose pin et al. 1994, Gao et al. 2001).

[0005] In the present invention, the inventors describe for the first time the association of a swollenin to a plant cell wall-degrading enzyme, such as the feruloyl esterase used as an enzyme model, by using a genetic fusion of the both corresponding genes.

### SUMMARY OF THE INVENTION

[0006] The present invention relies on the demonstration of the effect on enzymatic efficiency, related to the physical association in a single chimerical protein, of plant cell-wall degrading enzymes and swollenin, when compared to the use of the free plant cell-wall degrading enzymes.

[0007] Thus the main goal of the present invention is to provide new fusion proteins between swollenin and plant cell-wall degrading enzymes.

[0008] Another goal of the present invention is to provide a new process for the preparation of compounds of interest linked to the walls of plant cells, by applying said fusion proteins to plants, and advantageously to agricultural by-products, as substrates.

### BRIEF DESCRIPTION OF THE DRAWINGS

[0009] FIG. 1 represents the Feruloyl esterase (FAEA) production in Trichoderma reesei. Feruloyl esterase activity was measured in the extracellular medium obtained from the best FAEA transformants of T. reesei Rut-C () and CL847 (▪). Methyl ferulate was used as substrate for activity tests.

[0010] FIG. 2 illustrates Western blot analysis and copy number of integrated cassettes in the genome of T. reesei. Antibodies raised against FAEA were used for immunodetection of FAEA and SWOI-FAEA transformants from the total extracellular media, Lane 1 and 2: Rut-C30 tansformants producing FAEA and SWOI-FAEA, respectively. Lane 3 and 4: CL847 transformants producing FAEA and SWOI-FAEA, respectively. Copy number of expression cassettes was estimated by Southern blot analysis. The wild-type Aspergillus niger strain BRFM was used as control containing one fae A gene copy. Sd: molecular weight standards.

[0011] FIG. 3 represents SDS-PAGE gel of extracellular and purified proteins of Trichoderma reesei. Lane 1: non-transformed T. reesei CL847 strain. Lane 2 and 3: Total extracellular media of T. reesei CL847 strain transformed by the expression cassettes for FAEA or SWOI-FAEA production, respectively. Lanes 4 and 5: purified FAEA and SWOI-FAEA. Sd: molecular weight standards.

[0012] FIG. 4 shows the temperature stability of FAEA and SWOI-FAEA obtained from Trichoderma reesei strain 847. Activity of the purified protein FAEA (♦) and SWOI-FAEA (▪) after 60 min of incubation at the indicated temperature is represented. Methyl ferulate was used as substrate for activity tests.

[0013] FIG. 5 illustrates the ferulic acid release by using FAEA or SWOI-FAEA of Trichoderma reesei CL847. Wheat bran was used as substrate and ferulic acid release was determined by HPLC after 4 h (white bars), 16 h (grey bars) and 24 h (black bars) of hydrolysis. Activities were expressed as the percentage of the total amount of ferulic acid in wheat bran. R: reference containing only the buffer; S: extracellular medium of the non transformed strain; C: control as the feruloyl esterase from Aspergillus niger; F: feruloyl esterase (FAEA) from T reesei, S: swollenin (SWOI) from T. reesei; S—F fusion protein (SWOI-AEA) from T. reesei.

### DETAILED DESCRIPTION OF THE INVENTION

[0014] The invention relates to fusion proteins comprising:
[0015] at least a swollenin, i.e. a protein containing a carbohydrate-binding-molecule (CBM) domain which targets the cellulose of plants, and an expansin domain which breakdowns hydrogen bounds between cellulose microfibrils,
[0016] and at least a plant cell-wall degrading enzyme, said enzyme being such that it contains a CBM domain or not, provided that when it contains a CBM this latter may be deleted if necessary,

[0017] said swollenin, and plant cell-wall degrading enzyme, being recombinant proteins corresponding to native proteins in fungi, or mutated forms thereof.

[0018] The expression “plant cell-wall degrading enzymes” refers to enzymes that are able to perform the digestion of the cell-wall components, such as cellulose, hemicellulose and lignin. The plant cell-wall degrading enzymes in said fusion proteins are identical, or different from each other.

[0019] The expression “Carbohydrate-binding-molecule” refers to a molecule with affinity to cellulose that targets its associated enzyme to the cellulose,

[0020] The invention relates more particularly to fusion proteins as defined above, wherein the swollenin corresponds to native proteins, or mutated forms thereof, from fungi chosen among ascomycetes, such as
[0021] Trichoderma strains, and more particularly Trichoderma reesei, or
[0022] Aspergillus strains, and more particularly Aspergillus fumigatus.

[0023] The invention concerns more particularly fusion proteins as defined above, wherein the swollenin corresponds to native enzymes, or mutated forms thereof, from Trichoderma strains, such as Trichoderma reesei.

[0024] The invention more particularly relates to fusion proteins as defined above, wherein the swollenin is the protein of Trichoderma reesei, represented by:
[0025] SEQ ID NO: 2 in its pre-protein state, i.e. containing the signal peptide SEQ ID NO 102 of the following 18 aminoacids: MAGKLILVALASLVSLSI,
[0026] or by SEQ ID NO: 4 in its mature state, i.e. without the above-mentioned signal peptide.

[0027] The invention more particularly concerns fusion proteins as defined above, wherein the swollenin corresponds to native enzymes, or mutated forms thereof, from Aspergillus strains, such as Aspergillus fumigatus.

[0028] The invention more particularly relates to fusion proteins as defined above, wherein the swollenin is the protein of Aspergillus fumigatus, represented by:
[0029] SEQ ID NO: 6 in its pre-protein state, i.e. containing the signal peptide SEQ ID NO: 104 of the following 17 aminoacids: MTLLFGTFLARLAVAAA,
[0030] or by SEQ ID NO: 8 in its mature state, i.e. without the above-mentioned signal peptide.

[0031] The invention more particularly concerns fusion proteins as defined above, wherein the plant cell-wall degrading enzymes are chosen among enzymes able to hydrolyze cellulose, hemicellulose, and degrade lignin.

[0032] The invention more particularly relates to fusion proteins as defined above, wherein the plant cell-wall degrading enzymes are hydrolases chosen, among:
[0033] cellulases, such as endoglucanases, exoglucanases such as cellobiohydrolases, or β-glucosidases,
[0034] hemicellulases, such as xylanases,
[0035] ligninases able to degrade lignins, such as laccases, manganese peroxidases, lignin peroxidases, versatile peroxidases, or accessory enzymes such as cellobiose deshydrogenases, and aryl alcohol oxidases,
[0036] cinnamoyl ester hydrolases able to release cinnamic acids such as acids ferulic acids and to hydrolyse diferulic acid cross-links between hemicellulose chains, such as feruloyl esterases, cinnamoyl esterases, and chlorogenic acid hydrolases.

[0037] The invention more particularly concerns fusion proteins as defined above, wherein the plant cell-wall degrading enzymes are chosen among feruloyl esterases, cellobiohydrolases with or without their CBM domains, endoglucanases with or without their CBM domains, xylanases, and laccases.

[0038] The invention more particularly relates to fusion proteins as defined above, wherein the plant cell-wall degrading enzymes correspond to native enzymes, or mutated forms thereof, from fungi chosen among:
[0039] ascomycetes, such as
   [0040] Aspergillus strains, and more particularly Aspergillus niger,
   [0041] Trichoderma strains, and more particularly Trichoderma reesei,
   [0042] Magnaporthe strains, and more particularly Magnaporthe grisea,
[0043] basidiomycetes, such as Pycnoporus, Halocyphina, or Phanerochaete strains, and more particularly Pycnoporus cinnabarinus, Pycnoporus sanguineus, or Halocyphina villosa, or Phanerochaete chrysosporium.

[0044] The invention more particularly concerns fusion proteins as defined above, wherein the plant cell-wall degrading enzymes correspond to native enzymes, or mutated forms thereof, from Aspergillus strains, such as Aspergillus niger.

[0045] The invention more particularly relates to fusion proteins as defined above, wherein at least one of the plant cell-wall degrading enzymes is a feruloyl esterase, such as the one chosen among:
[0046] the feruloyl esterase A of A. niger represented by SEQ ID NO: 10,
[0047] or the feruloyl esterase B of A. niger represented by SEQ ID NO: 12.

[0048] The invention more particularly concerns fusion proteins as defined above, wherein at least one of the plant cell-wall degrading enzymes is a xylanase such as the xylanase B of A. niger represented by SEQ ID NO: 14.

[0049] The invention more particularly relates to fusion proteins as defined above, wherein the plant cell-wall degrading enzymes correspond to native enzymes, or mutated forms thereof, from Trichoderma strains, such as Trichoderma reesei.

[0050] The invention more particularly concerns fusion proteins as defined above, wherein at least one of the plant cell-wall degrading enzymes is a cellobiohydrolase, such as the one chosen among:
[0051] the cellobiohydrolase I of T. reesei, and represented by SEQ ID NO: 16,
[0052] the cellobiohydrolase I of T. reesei, wherein the CBM domain has been deleted, and represented by SEQ ID NO:18,
[0053] the cellobiohydrolase II of T. reesei, and represented by SEQ ID NO: 20,
[0054] the cellobiohydrolase II of T. reesei, wherein the CBM domain has been deleted, and represented by SEQ ID NO: 22.

[0055] The invention more particularly relates to fusion proteins as defined above, wherein at least one of the plant cell-wall degrading enzymes is an endoglucanase, such as the one chosen among:
[0056] the endoglucanase I of T. reesei, and represented by SEQ ID NO: 24,
[0057] the endoglucanase I of T. reesei, wherein the CBM domain has been deleted, and represented by SEQ ID NO: 26

[0058] The invention more particularly concerns fusion proteins as defined above, comprising linkers between at least two of the proteins comprised in said fusion proteins, said linkers being polypeptides from 10 to 100 aminoacids, advantageously of about 50 aminoacids.

[0059] The invention more particularly relates to fusion proteins as defined above, wherein a linker is included between each protein comprised in said fusion proteins.

[0060] The invention also more particularly relates to fusion proteins as defined above, wherein the linker is a hyperglycosylated polypeptide such as the sequence represented by SEQ ID NO: 28, present in the cellobiohydrolase B of A. niger.

[0061] The invention more particularly concerns fusion proteins as defined above, chosen among the fusion proteins of the swollenin of Trichoderma reesei represented by SEQ ID NO: 4, with:
[0062] the feruloyl esterase A of A. niger represented by SEQ ID NO:10, said fusion protein being represented by SEQ ID NO: 30,
[0063] the feruloyl esterase A of A. niger represented by SEQ ID NO:10, said fusion protein comprising the sequence represented by SEQ ID NO: 28 as a hyperglycosylated linker between SEQ ID NO: 4 and SEQ ID NO: 10, and being represented by SEQ ID NO: 32,
[0064] the feruloyl esterase B of A. niger represented by SEQ ID NO: 12, said fusion protein being represented by SEQ ID NO: 34
[0065] the feruloyl esterase B of A. niger represented by SEQ ID NO: 12, said fusion protein comprising the sequence represented by SEQ ID NO: 28 as a hyperglycosylated linker between or SEQ ID NO: 4 and SEQ ID NO: 12, and being represented by SEQ ID NO: 36,
[0066] the-xylanase B of A. niger represented by SEQ ID NO: 14, said fusion protein being represented by SEQ ID NO: 38,
[0067] the xylanase B of A. niger represented by SEQ ID NO: 14, said fusion protein comprising the sequence represented by SEQ ID NO: 28 as a hyperglycosylated linker between SEQ ID NO: 4 and SEQ ID NO: 14, and being represented by SEQ ID NOV 40,
[0068] the cellobiohydrolase I of T. reesei represented by SEQ ID NO:16, said fusion protein being represented by SEQ ID NO: 42,
[0069] the cellobiohydrolase I of T. reesei represented by SEQ ID NO:16, said fusion protein comprising the sequence represented by SEQ ID NO: 28 as a hyperglycosylated linker between SEQ ID NO: 4 and SEQ ID NO: 16, and being represented by SEQ ID NO: 44,
[0070] the cellobiohydrolase I of T. reesei without its endogenous CBM represented by SEQ ID NO: 18, said fusion protein being represented by SEQ ID NO: 46,
[0071] the cellobiohydrolase I of T. reesei without its endogenous CBM represented by SEQ ID NO:18, said fusion protein comprising the sequence represented by SEQ ID NO: 28 as a hyperglycosylated linker between SEQ ID NO: 4 and SEQ ID NO: 18, and being represented by SEQ ID NO:48,

[0072] the cellobiohydrolase II of T. reesei by SEQ ID NO: 20, said fusion protein being represented by SEQ ID NO: 50,
[0073] the cellobiohydrolase II of T. reesei represented by SEQ ID NO: 20, said fusion protein comprising the sequence represented by SEQ ID NO: 28 as a hyperglycosylated linker between SEQ ID NO: 4 and SEQ ID NO: 20, and being represented by SEQ ID NO: 52,
[0074] the cellobiohydrolase II of T. reesei without its endogenous CBM represented by SEQ ID NO: 22, said fusion protein being represented by SEQ ID NO: 54,
[0075] the cellobiohydrolase II of T. reesei without its endogenous CBM represented by SEQ ID NO: 22, said fusion protein comprising the sequence represented by SEQ ID NO: 28 as a hyperglycosylated linker between SEQ ID NO: 4 and SEQ ID NO: 22, and being represented by SEQ ID NO: 56,
[0076] the endoglucanase I of T. reesei represented by SEQ ID NO: 24, said fusion protein being represented by SEQ ID NO: 58,
[0077] the endoglucanase I of T. reesei represented by SEQ ID NO: 24, said fusion protein comprising the sequence represented by SEQ ID NO: 28 as a hyperglycosylated linker between SEQ ID NO: 4 and SEQ ID NO: 24, and being represented by SEQ ID NO: 60,
[0078] the endoglucanase I of T. reesei without its endogenous CBM represented by SEQ ID NO: 26, said fusion protein being represented by SEQ ID NO: 62,
[0079] the endoglucanase I of T. reesei without its endogenous CBM represented by SEQ ID NO: 26, said fusion protein comprising the sequence represented by SEQ ID NO: 28 as a hyperglycosylated linker between SEQ ID NO: 4 and SEQ ID NO: 26, and being represented by SEQ ID NO: 64.

[0080] The invention more particularly relates to fusion proteins as defined above, chosen among the fusion proteins of the swollenin of Aspergillus fumigatus represented by SEQ ID NO: 8, with
[0081] the feruloyl esterase A of A niger represented by SEQ ID NO: 10, said fusion protein being represented by SEQ ID NO: 66,
[0082] the feruloyl esterase A of A. niger represented by SEQ ID NO: 10, said fusion protein comprising the sequence represented by SEQ ID NO: 28 as a hyperglycosylated linker between SEQ ID NO: 8 and SEQ ID NO:10, and being represented by SEQ ID NO: 68,
[0083] the feruloyl esterase B of A. niger represented by SEQ ID NO:12, said fusion protein being represented by SEQ ID NO: 70,
[0084] the feruloyl esterase B of A. niger represented by SEQ ID NO: 12, said fusion protein comprising the sequence represented by SEQ ID NO: 28 as a hyperglycosylated linker between or SEQ ID NO: 8 and SEQ ID NO:12, and being represented by SEQ ID NO: 72,
[0085] the-xylanase B of A. niger represented by SEQ ID NO: 14, said fusion protein being represented by SEQ ID NO: 74,
[0086] the xylanase B of A. niger represented by SEQ ID NO: 14, said fusion protein comprising the sequence represented by SEQ ID NO: 28 as a hyperglycosylated linker between SEQ ID NO: 8 and SEQ ID NO: 14, and being represented by SEQ ID NO: 76,
[0087] the cellobiohydrolase I of T. reesei represented by SEQ ID NO: 16, said fusion protein being represented by SEQ ID NO: 78,
[0088] the cellobiohydrolase I of T. reesei represented by SEQ ID NO: 16, said fusion protein comprising the sequence represented by SEQ ID NO: 28 as a hyperglycosylated linker between SEQ ID NO: 8 and SEQ ID NO:16, and being represented by SEQ ID NO: 80,
[0089] the cellobiohydrolase I of T. reesei without its endogenous COM represented by SEQ ID NO: 18, said fusion protein being represented by SEQ ID NO: 82,
[0090] the cellobiohydrolase I of T. reesei without its endogenous CBM represented by SEQ ID NO: 18, said fusion protein comprising the sequence represented by SEQ ID NO: 28 as a hyperglycosylated linker between SEQ ID NO: 8 and SEQ ID NO:18, and being represented by SEQ ID NO: 84,
[0091] the cellobiohydrolase II of T. reesei by SEQ ID NO: 20, said fusion protein being represented by SEQ ID NO: 86,
[0092] the cellobiohydrolase II of T. reesei represented by SEQ ID NO: 20, said fusion protein comprising the sequence represented by SEQ ID NO: 28 as a hyperglycosylated linker between SEQ ID NO: 8 and SEQ ID NO: 20, and being represented by SEQ ID NO: 88,
[0093] the cellobiohydrolase II of T. reesei without its endogenous CBM represented by SEQ ID NO: 22, said fusion protein being represented by SEQ ID NO: 90,
[0094] the cellobiohydrolase II of T. reesei without its endogenous CBM represented by SEQ ID NO: 22, said fusion protein comprising the sequence represented by SEQ ID NO 28 as a hyperglycosylated linker between SEQ ID NO: 8 and SEQ ID NO: 22, and being represented by SEQ ID NO: 92,
[0095] the endoglucanase I of T. reesei represented by SEQ ID NO: 24, said fusion protein being represented by SEQ ID NO: 94,
[0096] the endoglucanase I of T. reesei represented by SEQ ID NO: 24, said fusion protein comprising the sequence represented by SEQ ID NO: 28 as a hyperglycosylated linker between SEQ ID NO: 8 and SEQ ID NO: 24, and being represented by SEQ ID NO: 96,
[0097] the endoglucanase I of T. reesei without its endogenous CBM represented by SEQ ID NO: 26, said fusion protein being represented by SEQ ID NO: 98,
[0098] the endoglucanase I of T. reesei without its endogenous CBM represented by SEQ ID NO: 26, said fusion protein comprising the sequence represented by SEQ ID NO: 28 as a hyperglycosylated linker between SEQ ID NO: 4 and SEQ ID NO: 26, and being represented by SEQ ID NO: 100.

[0099] The invention also concerns nucleic acids encoding a fusion protein as defined above, and more particularly nucleic acids chosen among SEQ ID NO: 29 to 99 encoding SEQ ID NO: 30 to 100, said nucleic acids optionally beginning with the sequence SEQ ID NO: 101 or 103 encoding respectively the signal peptides SEQ ID NO: 102 or 104 mentioned above located upstream from the aminoacids of SEQ ID NO: 30 to 100.

[0100] The invention also relates to vectors transformed with a nucleic acid as defined above.

[0101] The invention also concerns host cells transformed with a nucleic acid as defined above, using a vector as defined above.

[0102] The invention also relates to transformed host cells as defined above, chosen among fungi cells, such as the fungi as defined above, and more particularly A. niger, A. fumigatus, Trichoderma reesei, or Pycnoporus cinnabarinus.

[0103] The invention more particularly concerns a process for the preparation of fusion proteins as defined above, comprising the culture in vitro of host cells as defined above, the recovery, and if necessary, the purification of the fusion proteins produced by said host cells in culture.

[0104] The invention more particularly relates to the use of fusion proteins as defined above, for carrying out processes of plant cell-wall degradation in the frame of the preparation, from plants or vegetal by-products, of compounds of interest located in plant cell-wall, or in the frame of the bleaching of pulp and paper, or for biofuel production, or food industries.

[0105] The invention more particularly concerns the use as defined above for carrying out processes of plant cell-wall degradation in the frame of the preparation of the following compounds of interest:
[0106] bioethanol,
[0107] anti-oxidants, such as ferulic acid, or caffeic acid that are cinnamic acids and hydroxytyrosol or gallic acid
[0108] flavours, such as vanillin or p-hydroxybenzaldehyde obtained from the biotransformation of the ferulic or the p-coumaric acid, respectively.

[0109] The invention also relates to the use as defined above, wherein said fusion proteins are directly added to the plants or vegetal by-products as substrates for their hydrolysis.

[0110] The invention also relates to the use as defined above, wherein host cells transformed with nucleic acids encoding said fusion proteins, such as the fungi mentioned above, and more particularly A. niger and Pycnoporus cinnabarinus, are contacted with said plants or vegetal by-products as substrates for their hydrolysis.

[0111] The invention more particularly relates to a process of plant cell-wall degradation in the frame of the preparation, from plants or vegetal by-products, of compounds of interest located in plant cell-wall, characterized in that it comprises the following steps
[0112] the enzymatic treatment of plants or vegetal by-products or industrial waste, with fusion proteins as defined above, or with transformed cells as defined above,
[0113] optionally, the physical treatment of plants or vegetal by-products by steam explosion in combination with the action of fusion proteins,
[0114] optionally, the biotransformation with appropriate microorganisms or enzymes of the compounds contained in the cell walls and released from these latter during the above enzymatic treatment,
[0115] the recovery, and if necessary, the purification, of the compound of interest released from the cell walls during the above enzymatic treatment or obtained during the above biotransformation step.

[0116] Preferably, plants treated with fusion proteins in the process according to the invention are chosen among sugar beet, wheat, maize, rice, or all the trees used for paper industries.

[0117] Preferably, vegetal by-products or industrial waste treated wish fusion proteins in the process according to the invention are chosen among wheat straw, maize bran, wheat bran, rice bran, apple marc, coffee mare, coffee by-products and olive mill wastewater.

[0118] The invention more particularly concerns a process as defined above for the preparation of anti-oxidants, such as cinnamic acids, and more particularly ferulic acid, as compounds of interest, said process comprising:
[0119] the treatment of plants or vegetal by-products with fusion proteins as defined above comprising one of the swollenin mentioned above and at least one of the following cell-wall degrading enzymes: feruloyl esterases such feruloyl esterase A and feruloyl esterase B xylanases such as xylanase B, such as defined above,
[0120] the recovery, and if necessary, the purification, of the anti-oxidants released from the cell walls of said plants or vegetal by-products.

[0121] Advantageously, in the frame of the preparation of anti-oxidants, such as ferulic acid, plants treated with fusion proteins defined above are chosen among the following: sugar beet wheat, maize, rice, or vegetal by-products or industrial waste treated with fusion proteins defined above are chosen among the following: wheat straw, maize bran, wheat bran, rice bran, apple marc, coffee marc, coffee by-products, olive mill wastewater.

[0122] The invention also relates to a process as defined above for the preparation of flavours as compounds of interest, said process comprising:
[0123] the treatment of plants or vegetal by-products with the fusion proteins as defined above, used in the frame of the preparation of anti-oxidants as defined above,
[0124] the biotransformation of the compounds released from the cell walls during the preceding step by contacting said compounds with non defined enzymes produced by microorganisms chosen among ascomycetes or basidiomycetes such as A. niger or P. cinnabarinus, respectively,
[0125] the recovery, and if necessary, the purification, of the flavours obtained at the preceding step of biotransformation.

[0126] The invention more particularly relates to a process as defined above, for the preparation of vanillin as a flavour of interest, wherein the fusion protein used is chosen among those used for the preparation of ferulic acid as defined above, and the biotransformation step is carried out by contacting the ferulic acid released from the cell walls with non defined enzymes produced by ascomycetes or basidiomycetes such as A. niger or P. cinnabarinus, respectively.

[0127] Advantageously, plants and vegetal by-products or industrial waste used in the frame of the preparation of flavours, such as vanillin, are chosen among those mentioned above for the preparation of anti-oxidants.

[0128] The invention also relates to a process as defined above, for the preparation of bioethanol as a compound of interest, said process comprising:
[0129] the treatment of plants or vegetal by-products with fusion proteins as defined above comprising one of the swollenin mentioned above and at least one of the following cell-wall degrading enzymes: feruloyl esterases such feruloyl esterase A and feruloyl esterase B, xylanases such as xylanase B, cellulases such as endoglucanase I, cellobiohydrolase I and cellobiohydrolase II, such as defined above, said treatment being advantageously combined with a physical treatment of said plants or vegetal by-products,
[0130] the biotransformation of the treated plants or vegetal by-products obtained from the preceding step to fermentescible sugars, by using fusion proteins described above or with a transformed fungus secreting said fusion proteins, in combination with enzymes chosen among cellulases, hemicellulases or esterases, or microorganisms chosen among ascomycetes such as A. niger or Trichoderma reesei,
[0131] the biotranformation of the fermentescible sugars to bioethanol by yeast.

[0132] Advantageously, plants and vegetal by-products or industrial waste used in the frame of the preparation of bioethanol are chosen among the following: wood, annual plants, or agricultural by-products.

[0133] The invention also relates to a process for the bleaching of pulp and paper, said process comprising:
[0134] the chemical and physical treatment of plants or vegetal by-products in combination with fusion proteins as defined above comprising one of the swollenin mentioned above and at least one of the following cell-wall degrading enzymes: feruloyl esterases such feruloyl esterase A and feruloyl esterase B, xylanases such as xylanase B, ligninases such as laccases, manganese peroxidases, lignin peroxidases, versatile peroxidases, or accessory enzymes such as cellobiose deshydrogenases, and aryl alcohol oxidases, such as defined above,
[0135] optionally, the biopulping of the treated plants or vegetal by-products obtained at the preceding step, with a transformed fungus, such as P. cinnabarinus, T. reesei or A. niger, secreting fusion proteins as defined above comprising one of the swollenin mentioned above and at least one of The following cell-wall degrading enzymes: feruloyl esterases such feruloyl esterase A and feruloyl esterase B, xylanases such as xylanase B, ligninases able to degrade lignins, such as laccases, manganese peroxidases, lignin peroxidases, versatile peroxidases, or accessory enzymes such as cellobiose deshydrogenases, and aryl alcohol oxidases, as defined above,
[0136] the biobleaching of the treated plants or vegetal by-products obtained at the preceding step with fusion proteins as defined above comprising one of the swollenin mentioned above and at least one of the following cell-wall degrading enzymes: feruloyl esterases such feruloyl esterase A and feruloyl esterase B, xylanases such as xylanase B, ligninases able to degrade lignins, such as laccases, manganese peroxidases, lignin peroxidases, versatile peroxidases, or accessory enzymes such as cellobiose deshydrogenases, and aryl alcohol oxidases, such as defined above.

[0137] The invention is further illustrated with the detailed description which follows of the preparation and properties of the fusion protein between a swollenin and a plant cell wall-degrading enzyme, such as the feruloyl esterase.

[0138] Briefly, the action of an expansin-like protein was evaluated, in physical combination with the feruloyl esterase, for the release of ferulic acids, which are high value compounds derived from agricultural products. This hydroxycinnamic acid is an attractive aromatic acid, known as antioxidant and flavor precursor, in the food and pharmaceutical sectors. The recombinant enzyme was produced in T. reesei, know to be a very efficient host, to secrete large amount of extracellular proteins of industrial interest. The new recombinant enzyme was characterized and purified to be tested on a natural substrate. Finally, the recombinant strain producing the multi-modular enzyme was compared to the parental strain to evaluate the strain capacity for the ferulic acid release.

[0139] The aim of the present work was to study the effect of the association of a new category of protein, the swollenin from T. reesei (Saloheimo et al. 2002), which is involved in the disruption of the cell-wall structure, to a catalytic domain. For the enzymatic partner, a free accessory enzyme, the feruloyl esterase from A. niger, was selected as the model. Unlike standard CBM modules, the fungal swollenin is composed of two different domains, one being responsible of the substrate targeting and identified as a CBM. The second domain presents a strong similarity to plant expansins which were proposed to disrupt hydrogen bonding between cellulose microfibrils without having hydrolytic activity (Cosgrove 2000, Li et al. et al. 2003). The swollenin gene was expressed in yeast and in A. niger (Saloheimo et al. 2002) and activity assays were analysed on cotton fibres, filter papers and cell walls of the Valonia alga. T. reesei swollenin was demonstrated to modify the structure of cellulose fibres without detectable amounts of reducing sugars. In addition, the effect of the swollenin was more mainly attributed to the expansin domain and especially for the cellulose from cotton fibres and paper filters. As a conclusion, the swollenin is though to be a good candidate to represent the “swelling factor”, C1, as a non hydrolytic component necessary to make the substrate more accessible for hydrolytic components, Cx (Reese et al. 1950).

[0140] The biotechnological potential of such a protein is very attractive in the framework of plant biomass valorisation and the effect of the physical grafting of the swollenin to the feruloyl esterase for the release of ferutic acid was studied. Thus, this work represents the first work of the association of three different and complementary domains in a single enzymatic tool for an integrating action of targeting, disruption and hydrolysis. The production of the chimerical protein was achieved in two T. reesei industrial strains, RutC30 and CL847, in order to compare the production capacity of both strains. T. reesei is a well-known filamentous fungus used by the industrial sector for its outstanding capacity to produce cellulases (Montenecourt and Eveleigh 1979, Durand et al. 1988), and is a strain of reference to produce new enzymes at the industrial level. In parallel, the heterologous production of the FAEA alone was performed to be used as a control in our application trials.

[0141] In order to evaluate the effect generated by the physical proximity of both partners, SWO (SEQ ID NO: 4) was fused upstream the FAEA (SEQ ID NO: 10) without linker peptide. Therefore, SWOI was used as a carrier protein to facilitate the secretion of the heterologous FAEA. For the FAEA production, the signal peptide of the FAEA was maintained to target the secretion of the protein. The recombinant proteins, FAEA and SWOI-FAEA (SEQ ID NO: 30), were successfully produced by both strains of T. reesei. Concerning the FAEA, the CL 847 strain was shown to produce higher yields than compared to the Rut-C30 strain, i.e. 70 against 30 mg l⁻¹, while for the SWOI-FAEA protein, production reached the same level of 25 mg l⁻¹ for both strains.

[0142] The efficiency of the chimerical SWOI-FAEA protein was tested for the ferulc acid release using destarched wheat bran as substrate. In these application trials, the substrate was not pretreated by the temperature, as the disruption and swelling properties of swollenin should be a specific indicator of the action of the protein on the substrate. Ferulic acid was released with similar amounts using FAEA obtained from A. niger (Record et al. 2003) or T. reesei. This result confirms that both proteins have the same properties even if they are produced by two different host strains. If the free swollenin was added to the FAEA no further release was observed. On the other hand, a 50% increase of ferulic acid release was noticed with the SWOI-FAEA as compared to the action of the corresponding free modules. In addition, the T. reesei strain producing the chimerical SWOI-FAEA protein was evaluated to estimate the capacity of the transformed strain for the release of the ferulic acid. Using the concentrated extracellular medium of the T. reesei CL847 for a short period of incubation of 4 h, 45% of the total ferulic acid was obtained, corresponding to 1.8 g of ferulic acid by kg of wheat bran. As a conclusion, our tests of application have demonstrated tat SWOI-FAEA is more efficient than compared to the free module SWOI and FAEA for the ferulic acid release. The positive effect could be the result of the substrate targeting of the protein due to the endogenous CBM of SWOI. Thus, the CBM of SWOI could increase the local concentration of the enzyme to the proximity of the substrate and increase the final yields of hydrolysis. In addition, the efficiency of the chimerical protein could be improved by the particular mobility of SWOI expansin module (Cosgrove et al. 2000). Indeed, the expansin module is supposed to facilitate the lateral diffusion of the FAEA along the surface of the cellulose microfibrils, and at the same time to disrupt the cell wall structure, both actions being synergic for the final release of the ferulic acid. Actually, the swollenin partner of the chimerical enzyme should facilitate the access of the catalytic module by increasing the spectra of action of enzyme to the less accessible area.

[0143] This study demonstrates for the first time the positive effect of the physical proximity of an accessory enzyme to a protein involved in the cell wall disruption. Therefore, these enzymatic tools represent a non-polluting alternative and cost-reducing process to existing biotechnological process for the biotransformation of agricultural products. For instance, such chimerical enzymes can be used in the pulp and paper and bioethanol production sectors with other partner combinations depending on the biotechnological applications.

### EXAMPLES

### Materials and Methods

[0144] Strains

[0145] Echerichia coli JM 109 (Promega, Charbonnières, France) was used for construction and propagation of vectors. Trichoderma reesei strain Rut-C30 (Montenecourt and Eveleigh 1979) and CL847 (Durand et al. 1998) was used for heterologous expression using the different expression cassettes.

[0146] Media and Culture Conditions

[0147] T. reesei strains were maintained on potato dextrose agar (Difco, Sparks, Md.) slants. Transformants were regenerated on minimum solid medium containing per liter: (NH₄)₂SO₄ 5.0 g, KH2PO₄ 15.0 g, CaCl₂ 0.45 g, MgSO₄ 0.6 g, CoCl₂ 3.7 mg, FeSO₄.H₂O 5 mg, ZnSO₄.H₂O 1.4 mg; MnSO₄.H₂O 1.6 mg, glucose as carbon source, sorbitol 182 g as osmotic stabilizer and hygromycine 125 mg for the selection. Plates were solidified and colony growth was restricted by adding 2% agar 0.1% Triton X-100 to the medium. Transformed protoplasts were plated in 3% selective top agar containing IM sorbitol.

[0148] In order to screen the FAEA activity from different transformants, fungi were grown on minimum medium containing per liter: (NH₄)₂SO₄ 5.0 g, KH₂PO₄ 15.0 g, CaCl₂ 0.6 g, MgSO₄0.6 g, CoCl₂ 3.7 mg, FeSO₄.H₂O 5 mg, ZnSO₄.H₂O 1.4 mg; MnSO₄.H₂O 1.6 mg, peptone 5 g and lactose 40 g and Solka floc cellulose (International Fiber Corporation, North Tonawanda, N.Y.) 20 g as carbon sources and inducers, Pipes 33 g to adjust pH to 5.2 with KOH. The culture medium was inoculated with 1×10⁷ spores per 50 ml and grown in conical flasks at 30° C. with shaking at 200 rpm.

[0149] Expression Vectors and Fungal Transformation

[0150] The cDNA encoding FAEA and SWOI were PCR amplified from plasmid pF (Record et al. 2003) and pMS89 including the signal peptide was amplified by using
[0151] either the F1 forward primer 5′-GATACCGCGGATGAAGCAATTCTCTGC-3′ (with the SacII site underlined)
[0152] or the F2 primer 5′-GTGCAGTTTAGCAATGCCTCCACGCAAGGCATC-3′ and the R1 reverse primer
   5′-AATACATATGTGGAGTGGTGGTGGTGGTGGTGCOAAGTACAAGCTCCGCTCG-3′ (with the NdeI site underlined, His-tag is dot lined).

[0153] The first primer pair (F1/R1) was used to obtain an amplified DNA fragment that will be used in the expression cassette pFaeA for the faeA-encoding gene (SEQ ID NO: 9) expression (Y09330) in T. reesei. The second construct was obtained by fusing the faeA gene to the gene (AJ245918) encoding SWO1 (SEQ ID NO: 1) by using an overlap extension PCR (Ho et al. 1989). In a first PCR experiment, the faeA gene was amplified by using the primer pair F2/R1 and the F3 forward primer

5′-ATATCCGCGGATGGCTGGTAAGCTTATC-3′
(with the SacII site underlined)

and the R2 reverse primer

5′-GATGCCTTGCGTGGAGGCATTCTGGCTAAACTGCAC-3′.

[0154] Both resulting overlapping fragments were mixed and a fused fragment was synthesized by using only external primers. This newly obtained fragment was cloned in the expression cassette to express the Swo1-FaeA fusion gene (pSwo-Faea).

[0155] Both amplified fragment was checked by sequencing, then ligated in the expression vector pANM1110 (cloning sites, SacII and NdeI) after digestion with SacII and NdeI restriction enzymes. In this vector, the T. reesei cellobiohydrolase I-encoding gene (cbhl) promoter was used to drive the expression of both inserts. In the first (pFaeA) and second (pSwo-FaeA) expression cassettes, the signal peptide of FAEA and SWO1, respectively, were used to initiate the secretion of the recombinant proteins.

[0156] Fungal transformation was carried out as described previously (Penttilä et al. 1987) by using the expression vectors. Transformants were purified by selection of conidia on selective medium.

[0157] Screening of the Feruloyl Esterase Activity

[0158] Cultures were monitored for 10 days at 30° C. in a shaker incubator and the pH was adjusted to 5.5 daily with a 1 M KOH. Each culture condition was performed in duplicate. From liquid culture medium, aliquots (1 mL) were collected daily and mycelia were removed by filtration. Esterase activity was assayed as previously described using methyl ferulate (MFA) as the substrate (Ralet et al. 1994). Activities were expressed in nkatal (nkat), 1 nkat being defined as the amount of enzyme that catalyzes the release of 1 nmol of ferulic acids per sec under established conditions. Each experiment was done in duplicate and measurements in triplicate. The standard deviation was recorded to less than 2% for the mean.

[0159] Protein and Western Blot Analysis

[0160] Protein concentration was determined according to Lowry et al. (1951) with bovine serum albumin as standard. Protein purification was followed by SDS-polyacrylamide gel electrophoresis on 10% polyacrylamide slab gels (Laemli 1970). Then, proteins were stained with Coomassie blue. The N-terminal sequence was determined from an electroblotted FAEA sample (40 μg) onto a poly(vinylidine difluoride) membrane (Millipore, Saint-Quentin-Yvelines, France) according to Edman degradation. Analyses were carried out on an Applied Biosystem 470A.

[0161] For Western blot analysis, total and purified proteins were electrophoresed in 11% SDS/polyacrylamide gel and electroblotted onto BA8S nitrocellulose membranes (Schleicher and Schuell, Dassel, Germany) at room temperature for 45 min. Membranes were incubated in blocking solution (50 mM Tris, 150 mM NaCl and 2% (v/v) milk pH 7.5) overnight at 4° C. Then, membranes were washed with TBS-0.2% Tween and treated with blocking solution containing anti-FAEA serum at a dilution of 1/6000. For anti-FAEA antibodies, membranes were subsequently incubated with goat anti-rabbit immunoglobin G conjugated with alkaline phosphatase (1/2500) (Promega). Alkaline phosphatase was color developed using the 5-bromo-4-chloro-3-indoyl phosphate-nitro blue tetrazolium assay (Roche Applied Science, Meylan, France) according to the manufacturer's procedure.

[0162] Purification and Characterization of the Proteins

[0163] To purity both recombinant proteins, the best isolate for each construct was inoculated in the same conditions as the screening procedure. Culture was harvested after 8 days of growth, filtered (0.7 μm) and concentrated by ultrafiltration through a polyethersulfone membrane (molecular mass cut-off of 30 kDa) (Millipore). Concentrated fractions were dialyzed against a 30 mM Tris-HCl, pH 7.0, binding buffer and the purification of His-tagged proteins was performed on a Chelating Sepharose Fast Flow column (13×15 cm) (Amersham Biosciences) (Porath et al. 1975).

[0164] The main enzymatic characteristics were determined for both recombinant proteins. Thermostability of the purified proteins (100% refers to 4.3 and 0.2 nanokatals ml⁻¹ of FAEA and SWOI-FAEA, respectively) was tested in the range of 30 to 70° C. Aliquots were preincubated at the designated temperature for 60 min and after cooling at 0° C., esterase activities was then assayed as previously indicated in standard conditions. Samples were analyzed by SDS-PAGE after incubation in order to verify integrity of the recombinant proteins. Effect of the pH on protein stability was also studied by incubating for 60 min the purified recombinant proteins in citrate-phosphate buffer (pH 2.5-7.0) and sodium phosphate (pH 7.0-8.0). All incubations were performed for 90 min, and then aliquots were transferred in standard rectional mixture to determine the amount of remaining activity. The activity determined prior to the preincubations was taken as 100% (4.3 and 0.2 nanokatals ml⁻¹ of FAEA and FAEA-SWO, respectively).

[0165] To determine optimal temperature under the conditions used, aliquots of purified recombinant proteins (100% refers to 4.3 and 0.2 nanokatals ml⁻¹ of FAEA and SWOI-FAEA, respectively) were incubated at various temperatures (30 to 70° C.) and esterase activities were assayed. Optimal pH was determined by using citrate-phosphate buffer (pH 2.5-7.0) and sodium phosphate buffer (pH 7.0-8.0) using standard-conditions.

[0166] Southern Blot Analysis

[0167] Genomic DNA of each transformants (10 μg) was digested overnight with various restriction enzymes and electrophoresed on a 0.5% agarose-TAE gel. The DNA was then blotted onto a Hybond N+ membrane and probed with a ³²P-labelled probed consisting of the faeA PCR amplified sequence. Hybridization was carried out in a buffer containing 0.5M sodium phosphate pH7.2, 0.0M EDTA, 7% (w/v) SDS, 2% (w/v) blocking agent (Roche Applied Science) overnight at 65° C. Post hybridization washes consisted of 2×15 min in 0.2 SSC (1×SSC is 0.15 M NaCl plus 0.015 M sodium citrate buffer pH 7.0), containing 1% SDS at 65° C. and 1×5 min in 0.2×SSC at room temperature. The blots were exposed to X-ray film (Biomax MR, Eastman Kodak Company, New York, USA).The wild-type A. niger strain BRFM 281 (Banque de Ressources Fongique de Marseille) was used as control containing one fae A gene copy.

[0168] Application Tests

[0169] Wheat bran (WB) was destarched and provided by ARD (Agro-industrie Recherche et Development, Pomacle, France). Enzymatic hydrolysis were performed in 0.1 M 3-(N-morpholino)propanesulfonic acid (MOPS) buffer containing 0.01% sodium azide at pH 6.0, in a thermostatically controlled shaking incubator (120 rpm) at 37° C. WB (180 mg) were incubated with the purified, FAEA, SWOI+FAEA and SWOI−FAEA, independently, in a final volume of 5 mL. Concerning test applications with culture medium from transformants, the final volume was increased to 9 ml. The enzyme concentrations were of 1.8 nkatal of esterase activity per 180 mg of dry bran for each assay. Each assay was done in duplicate and the standard deviation was less than 5% from the mean of the value for WB.

[0170] To estimate the hydroxycinnamic acid content, total alkali-extractable of phenolic compounds was determined by adding 20 mg of WB or MB in 2 N NaOH and incubated for 30 min at 35° C. in the darkness. The pH was adjusted to 2 with 2N HCl. Phenolic acids were extracted three times with 3 mL of ether. The organic phase was transferred to a test tube and dried at 40° C. One milliliter of methanol/H₂O (50:50) (v/v) was added to dry extract and samples were injected on an HPLC system as described in the next section. The total alkali-extractable ferulic acid content was considered as 100% for the enzymatic hydrolysis.

[0171] Finally to determine the ferulic acid content, enzymatic hydrolysates were diluted to ½ with acetic acid 5%, centrifuged at 12,000×g for 5 mm and supernatants were filtered through a 0.2 μm nylon filter (Gelman Sciences, Acrodisc 13, Ann Arbor, Mich.). Filtrates were analysed by HPLC (25 μL injected). HPLC analyses were performed at 280 nm and 30° C. on a HP11100 model (Hewlett-Packard Rockville, Md.) equipped with a variable UVNIS detector, a 100-position autosampler-autoinjector. Separations were achieved on a Merck RP-18 reversed-phase column (Chromolith 3.5 μm, 4.6×100 mm, Merck). The flow rate was 1.4 mL/min. The mobile phase used was 1% acetic acid and 10% acetonitrile in water (A) versus acetonitrile 100% (B) for a total running time of 20 min, and the gradient changed as follows: solvent B started at 0% for 2 min, then increased to 50% in 10 min, to 100% in 3 min until the end of running. Data were processed by a HP 3365 ChemStation and quantification was performed by external standard calibration.

### Example 1

### Fungal Transformation and Production of the Recombinant Enzymes

[0172] Two T. reesei strains, Rut-C30 and CL847, used by industrial companies to produce in controlled fermentation processes large amount of enzymes, were transformed by expression vectors containing genes of interest. In a first construct, the faeA gene from A. niger was placed under the control of the cbhI gene promoter using the signal peptide of the FAEA to target the secretion. The recombinant FAEA was used in the following application tests as a control. In a second construct, the faeA gene was fused to the swoI-encoding gene to produced a chimerical protein associating the A. niger FAEA to the T. reesei SWOI protein. In this construct, the signal peptide of SWOI was used for secretion of the recombinant protein. Protoplastes obtained from both strains were transformed independently by both genetic cassettes cloned in the expression vector pAMH10. Transformants were then selected for their abilities to grow in minimal medium containing hygromycine. Approximately three hundred transformants were filter purified by selection of conidia on selective medium, and more or less 150 hygromycine-resistant colonies were screened by detecting the feruloyl esterase activity produced in the culture medium, and by performing a western blot analysis. Considering all the transformants, only a feriloyl activity was detectable for those transformed by pFaeA (FaeA transformants). In addition, the production of FAEA was confirmed by western blot analysis. Concerning T. reesei colonies transformed by pSwo-FaeA (Swo-FaeA transformants), a FAEA production was only detected by western blot analysis, because the feruloyl esterase activity was very low produced. However, for the FaeA transformants, 1.3 and 23.3% of the colonies were shown to produce a feruloyl esterase activity, respectively, for Rut-C30 and CL847 strains. In the second transformation event using pSwo-FaeA, the percentage was higher, with 23.3 and 51.7% of the colonies, respectively. For each construct and T. reesei strains, the best producing transformants was then cultured to study the time course of the feruloyl esterase activity.

[0173] Esterase activity was estimated in both transformed Rut-C30 and CL847 that were transformed by pFAEA and reported as a function of time (FIG. 1). In both cases, esterase activity was detectable already on day 2 and increased progressively to 0.45 and 1.15 nkatal mL⁻¹, respectively. Concerning T. reesei transformed by pSwo-FaeA, a low activity was measured on day 8 of approximately 0.06 nkatal mL⁻¹ for both strains Western blot analysis were performed from the culture medium of FaeA transformants (FIG. 2) and a band of approximately 40 kDa corresponding to the recombinant FAEA was showed (FIG. 2, lanes 1 and 3). Beside this first set of fungal transformants, the Swo-FaeA transformants produced a major band of approximately 120 kDa corresponding to the fusion of the FAEA (36 kDa) and the SWOI protein (75 kDa) (FIG. 2, lane 2 and 4). Furthermore, a weak band of 40 kDa appeared that corresponds to the size of the FAEA. Finally, the copy number of expression cassettes integrated in the fungal genome was estimated by Southern blot analysis and revealed that the FaeA transformants contains 4 to 5 and 9 to 10 copies, respectively for strains Rut-C30 and CL847. Concerning the Swo-FaeA transformant set, 6 to 7 and 14 to 15 copies were estimated for both strains, respectively. As the T. reesei CL847 has produces the same amount of SWOI-FAEA than the Rut-C30 strain, but higher yield of FAEA, the following experiments were performed with proteins obtained from this strain.

### Example 2

### Characterization of the Recombinant Enzymes

[0174] The purified FAEA and chimerical SWOI-FAEA were purified on a Chelating Sepharose column and the homogeneity of proteins was checked on an SDS/polyacrylamide gel (FIG. 3). The molecular mass of the recombinant FAEA were slightly higher than expected as compared to the FAEA produced in A. niger. Both N-terminal sequences of the FAEA (ASTQG) and the SWOI-FAEA (QQNCA) were sequenced and were found to be 100% identical to those of the corresponding native proteins, demonstrating that the processing was correct. All the main physico-chemical and kinetic properties were further determined and compared to the FAEA from A. niger (Record et al. 2003) (Table I and FIG. 4). Considering the effect of temperature and pH, as well as the pH stability, no significant difference was found. The temperature stability of both proteins were also estimated and our results showed that the recombinant FAEA was stable until 45° C. and that the activity decreased by 60% after an incubation of 60 min at 55° C. No remaining activity was found at 60° C. On the other hand, concerning the SWOI-FAEA protein, activity was stable until 40° C. and no remaining activity was detected after a 60-min incubation at 50° C. No great difference was found for the Km value. But, while Vm and specific activities were in the same range for the FAEA produced by A. niger and T. reesei, a clear shift was observed for the SWOI-FAEA protein that was found to be less efficient to hydrolyse the methyl ferulate that the corresponding FAEA.

### Example 3

### Enzymatic Release of Ferulic Acid from Wheat Bran

[0175] The synergistic effect generated by the physical proximity of the FAEA and SWOI was studied for the release of ferulic acid from wheat bran. Wheat bran was incubated with purified enzymes (FIG. 5) and results showed that FAEA produced in A. niger and T. reesei was able to release the same amount of ferulic acid, i.e. from 6 to 9% depending on the incubation time. Considering the SWOI, the native protein alone or in addition with FAEA (S or F+S) was not efficient if compared to the reference or the experiment with FAEA, respectively. On the other hand, a significant higher value of ferulic acid release, i.e. from 7 to 13.5% was obtained with the SWOI-FAEA protein corresponding to an improvement factor of 1.5 after 24 hour of hydrolysis

[0176] The recombinant CL847 strain producing the recombinant SWOI-FAEA was evaluated for the release of ferulic acid using the total extracellular cocktail of secreted enzymes. While the extracellular medium obtained form the non transformed parental strain was able to release 0.5 to 1.8% of ferulic acid from 4 to 24 hours of incubation, the transformed CL847 strain secreted an enzymatic cocktail including the SWOI-FAEA that released up to 45% until 4 hours, i.e. 1.8 g of ferulic acid by kg of wheat bran. This yield did not increase even after 24 hours of incubation.

TABLE 1
Physico-chemical and kinetic characteristics
of the recombinant feruloyl esterase and the
chimerical enzyme from Trichoderma reesei

| | FAEA^{a} | FAEA | SWOI-FAEA |
|---|---|---|---|
| MM (kDa) | 36 | 40 | 120 |
| Tp optimum (° C.) | 55 | 50-55 | 50 |
| Tp stability (° C.) | — | 45 | 40 |
| pH optimum | 5 | 5 | 5 |
| pH stability | 5-6 | 5-6 | 5-6 |
| Km^{b} | 0.75 | 0.83 | 0.81 |
| Vm^{c} | 382 | 291 | 52 |
| Specific activity^{d} | 20 | 16.4 | 2.6 |

^{a}estimated from the Aspergillus niger feruloyl esterase (Record et al. 2003)
^{b}Km were expressed in millimolar
^{c}Vm were expressed in nanokatal per mg of protein
^{d}Specific activities were expressed in nanokatal per mg of protein

^{c}Vm were expressed in nanokatal per mg of protein
^{d} Specific activities were expressed in nanokatal per mg of protein

[0177] Activities were assayed using methyl ferulate as substrate

### REFERENCES

[0178] Boraston A B, Bolarn D N, Gilbert H J, Davies G J (2004) Carbohydrate-binding modules: fine-tuning polysaccharide recognition. Biochem J, 382: 769-781.
[0179] Ciruela A H J, Gilbert B R Ali, Hazlewood G P (1998) Synergistic interaction of the cellulosome integrating protein (CipA) from Clostridium thermocellum with a cellulosomal endoglucanase. FEBS Lett 422:221-224,
[0180] Cosgrove D J (2000) Expansive growth of plant cell walls. Plant Physiol Biochem. 38:109-24
[0181] Crepin V F, Faulds C B, Connerton I F (2003) Functional classification of the microbial feruloyl esterases. Appl Microbiol Biotechnol 63:647-52.
[0182] Cosgrove D J (2000) Loosening of plant cell wall by expansin, Nature 407:321-326.
[0183] de Vries R P, Michelsen B, Poulsen C H., Kroon Pa., van den Heuvel R H H, Faulds C B, Williamson G, van den Hombergh J P T W, Visser J (1997). The faeA genes from Aspergillus niger and Aspergllus tubingensis encode ferulic acid esterases involved in degradation of complex cell wall polysaccharides. Appl Environ Microbiol 63:4638-4644.
[0184] de Vries R P, VanKuyk P A, Kester H C M, Visser. J. (2002) The Aspergillus niger faeb gene encodes a second feruloyl esterase involved in pectin and xylan degradation and is specifically induced in the presence of aromatic compounds. Biochem J 363, 377-386.
[0185] Din N, Gilkes N R, Tekan B, Miller R C Jr, Warren R A J, Kilburn D G (1991) Non-hydrolytic disruption of cellulose fibres by the binding domain of a bacterial cellulose. Bio/technol 9-1096-1099.
[0186] Durand H, Baron M, Calmels T, Tiraby G (1988) Classical and molecular genetics applied to Trichoderma reesei for the selection of improved cellulolytic industrial strains, FEMS Symp 43:1135-152.
[0187] Faulds C B, Williamson G (1994) Purification and characterization of a ferulic acid esterase (FAEIII) from Aspergillus niger: specificity for the phenolic moiety and binding to microcrystalline cellulose. Microbiology 140:779-787.
[0188] Fierobe, H. P., E. A Bayer, C. Tardif M. Czjzek, A. Mechaly, A. Belaich, R. Lamed, Y. Shoham, and J. P. Belaich. 2002. Degradation of cellulose substrates by cellulosome chimeras. Substrate targeting versus proximity of enzyme components. J. Biol. Chem. 277:49621-49630.
[0189] Gao P J, Chen G J, Wang T H, Zhang Y S, Liu J (2001) Non-hydrolytic disruption of crystalline structure of cellulose by cellulose binding domain and linker sequence of cellobiohydrolase I from Penicillium janthinellum. Shengwu Huaxue Yu Shengwu Wuli Xuebao 33, 13-18.
[0190] Ho, S. N., H. D. Hunt, R. M Horton, J. K. Pullen, L. R. Pease. 1989. Site-directed mutagenesis by overlap extension using the polymerase chain reaction. Gene. 77:51-59.
[0191] Ito J, Fujita Y, Ueda M, Fukuda H, Kondo A (2004) Improvement of cellulose-degrading ability of a yeast strain displaying Trichoderma reesei endoglucanase II by recombination of cellulose-binding domains. Biotechnol Prog 20:688-91.
[0192] Juge N, Wiliamson G, Puigserver A, Cummings N J, Connerton I F, Faulds C B (2001) High-level production of recombinant Aspergillus niger cinnamoyl esterase (FAEA) in the methylotrophic yeast Pichia pastoris. FEMS Yeast Research 1:127-132.
[0193] Kroon, P. A., Faulds C. B., Williamson G (1996) Purification and characterization of a novel esterase induced by growth of Aspergillus niger on sugar beet pulp. Biotechlol. Appl. Biochem. 23, 255-262.
[0194] Laemli U K (1970) Cleavage of structural proteins during the assembly of the head of bacteriophage T4. Nature 227:680-685.
[0195] Levasseur A, Benoit 1, Asther M, Asther M, Record E (2004) Homologous expression of the feruloyl esterase B gene from Aspergillus niger and characterization of the recombinant enzyme. Protein Expr Purif 37:126-33.
[0196] Levasseur A., Navarro D., Punt P. J., Belaich J-P., Asther M., Record E. (2005) Improvement of ferulic acid release by action of engineered bifunctional enzymes associating the feruloyl esterase A, the xylanase B and a carbohydrate-binding module from Aspergillus niger. Appl and Envir Microbiol, 71:8132-8140.
[0197] Li Y, Jones L, McQueen-Mason (2003) Expansins and cell growth. Curr Opinion Plant Biol 6:603-610.
[0198] Limon M C, Chacon M R, Mejias R, Delgado-Jarana J, Rincon A M, Codon A C, Benitez T (2004) Increased antifingal and chitinase specific activities of Trichoderma harzianum CECT 2413 by addition of a cellulose binding domain. Appl Microbiol Biotechnol 64:675-85.
[0199] Lowry O H, Rosebrough N J, Farr A L, Randall R J (1951) Protein measurement with the Folin phenol reagent. J Biol Chem 193:265-275.
[0200] Montenecourt B S, Eveleigh D E (1977) Selective screening methods for the isolation of high yielding cellulase mutants of Trichoderma reesei on various carbon sources. Adv Chem Ser 181:289-301.
[0201] Penttila M, Nevalainen H, Ratto M, Salminen E, Knowles J. (1987) A versatle transformation system for the cellulolytic filamentous fungus Trichoderma reesei. Gene 61:155-64.
[0202] Porath, J, Carlsson J, Olsson I, Belfrage G (1975). Metal chelate affinity chromatography, a new approach to protein fractionation. Nature. 258:598-599.
[0203] Record, E., Asther M., Sigoillot C., Pages S., Punt P. J., Delattre M., Haon M., van den Hondel C. A., Sigoillot J. C., Lesage-Meessen L., Asther M. (2003) Overproduction of the Aspergillus niger feruloyl esterase for pulp bleaching application. Appl. Microbiol. Biotechnol. 62:349-355.
[0204] Ralet M. C, Faulds C B, Williamson G, Thibault J F (1994) Degradation of feruloylated oligosaccharides from sugar-beet pulp and wheat bran by ferulic acid esterases from Aspergillus niger. Carbohydr Res 263:257-269.
[0205] Reese E T, Siu R G H, Levinson H S (1950) The biological degradation of soluble cellulose derivatives and its relationship to the mechanism of cellulose hydrolysis, J Bacteriol 59, 485-497.
[0206] Saloheimo M., Paloheimo M., Hakola S., Pere J., Swanson B., Nyyssonen E., Bhatia A., Ward M., Penttila M. (2002). Swollenin, a Trichoderman reesei protein with sequence similarity to the plant expansins, exhibits disruption activity on cellulosic materials. Eur J Biochem 269:4202-4211.
[0207] Saulnier L, Thibault J F (1999) Ferulic acid and diferulic acids as components of sugar-beet pectins and maize bran heteroxylans. J Sci Food Agric 79:396-402.
[0208] Sigoillot C, Camarero S Vidal T, Record E, Asther M, Perez-Boada M, Martinez M J, Sigoillot J C, Asther M, Colom J F, Martinez A T (2005) Comparison of different fungal enzymes for bleaching high-quality paper pulps. J Biotechnol 115:333-43.
[0209] Williamson G, Kroon P A, Faulds G B (1998) Hairy plant polysaccharides: a close shave with microbial esterases. Microbiol. 144:2011-2023.

1. Fusion proteins comprising:
at least a swollenin, i.e. a protein containing a carbohydrate-binding-molecule (CBM) domain which targets the cellulose of plants, and an expansin domain which breakdowns hydrogen bounds between cellulose microfibrils,
and at least a plant cell-wall degrading enzyme, said enzyme being such that it contains a CBM domain or not, provided that when it contains a CBM this latter may be deleted if necessary,
said swollenin, and plant cell-wall degrading enzyme, being recombinant proteins corresponding to native proteins in fungi, or mutated forms thereof.

2. Fusion proteins according to claim 1, wherein the swollenin corresponds to native proteins, or mutated forms thereof, from fungi chosen among ascomycetes, such as:
Trichoderma strains, and more particularly Trichoderma reesei, or Aspergillus strains, and more particularly Aspergillus fumigatus.

3. Fusion proteins according to claim 1, wherein the swollenin corresponds to native enzymes, or mutated forms thereof, from Trichoderma strains, such as Trichoderma reesei.

4. Fusion proteins according to claim 1, wherein the swollenin is the protein of Trichoderma reesei, represented by SEQ ID NO: 2 with its signal peptide, or by SEQ ID NO: 4 in its mature state.

5. Fusion proteins according to claim 1, wherein the swollenin corresponds to native enzymes, or mutated forms thereof, from Aspergillus strains, such as Aspergillus fumigatus.

6. Fusion proteins according to claim 5, wherein the swollenin is the protein of Aspergillus fumigatus, represented by SEQ ID NO: 6 with its signal peptide, or by SEQ ID NO: 8 in its mature state.

7. Fusion proteins according to claim 1, wherein the plant cell-wall degrading enzymes are chosen among enzymes able to hydrolyze cellulose, hemicellulose, and degrade lignin.

8. Fusion proteins according to claim 1, wherein the plant cell-wall degrading enzymes are hydrolases chosen among:
cellulases, such as endoglucanases, exoglucanases such as cellobiohydrolases, or β-glucosidases,
hemicellulases, such as xylanases,
ligninases able to degrade lignins, such as laccases, manganese peroxidase, lignin peroxidase, versatile peroxidase, or accessory enzymes such as cellobiose deshydrogenases, and aryl alcohol oxidases,
cinnamoyl ester hydrolases able to release cinnamic acids such as ferulic acids and to hydrolyse diferulic acid cross-links between hemicellulose chains, such as feruloyl esterases, cinnamoyl esterases, and chlorogenic acid hydrolases.

9. Fusion proteins according to claim 1, wherein the plant cell-wall degrading enzymes are chosen among feruloyl esterases, cellobiohydrolases with or without their CBM domains, endoglucanases with or without their CBM domains, xylanases, and laccases.

10. Fusion proteins according to claim 1, wherein the plant cell-wall degrading enzymes correspond to native enzymes, or mutated forms thereof, from fungi chosen among:
ascomycetes, such as:
Aspergillus strains, and more particularly Aspergillus niger,
Trichoderma strains, and more particularly Trichoderma reesei,
Magnaporthe strains, and more particularly Magnaporthe grisea,
basidiomycetes, such as Pycnoporus, Halocyphina, or Phanerochaete strains, and more particularly Pycnoporus cinnabarinus, Pycnoporus sanguineus, or Halocyphina villosa, or Phanerochaete chrysosporium.

11. Fusion proteins according to claim 1, wherein the plant cell-wall degrading enzymes correspond to native enzymes, or mutated forms thereof, from Aspergillus strains, such as Aspergillus niger.

12. Fusion proteins according to claim 1, wherein at least one of the plant cell-wall degrading enzymes is a feruloyl esterase, such as the one chosen among:
the feruloyl esterase A of A. niger represented by SEQ ID NO: 10,
or the feruloyl esterase B of A. niger represented by SEQ ID NO: 12.

13. Fusion proteins according to claim 1, wherein at least one of the plant cell-wall degrading enzymes is a xylanase such as the xylanase B of A. niger represented by SEQ ID NO: 14.

14. Fusion proteins according to claim 1, wherein the plant cell-wall degrading enzymes correspond to native enzymes, or mutated forms thereof, from Trichoderma strains, such as Trichoderma reesei.

15. Fusion proteins according to claim 14, wherein at least one of the plant cell-wall degrading enzymes is a cellobiohydrolase, such as the one chosen among:
the cellobiohydrolase I of T. reesei, and represented by SEQ ID NO: 16,
the cellobiohydrolase I of T. reesei, wherein the CBM domain has been deleted, and represented by SEQ ID NO: 18,
the cellobiohydrolase II of T. reesei, and represented by SEQ ID NO: 20,
the cellobiohydrolase II of T. reesei, wherein the CBM domain has been deleted, and represented by SEQ ID NO: 22.

16. Fusion proteins according to claim 14, wherein at least one of the plant cell-wall degrading enzymes is an endoglucanase, such as the one chosen among:
the endoglucanase I of T. reesei, and represented by SEQ ID NO: 24,
the endoglucanase I of T. reesei, wherein the CBM domain has been deleted, and represented by SEQ ID NO: 26.

17. Fusion proteins according to claim 1, comprising linkers between at least two of the proteins comprised in said fusion proteins, said linkers being polypeptides from 10 to 100 aminoacids, advantageously of about 50 aminoacids.

18. Fusion proteins according to claim 1, wherein a linker is included between each protein comprised in said fusion proteins.

19. Fusion proteins according to claim 1, wherein the linker is a hyperglycosylated polypeptide such as the sequence represented by SEQ ID NO: 28, present in the cellobiohydrolase B of A. niger.

20. Fusion proteins according to claim 1, chosen among the fusion proteins of the swollenin of Trichoderma reesei represented by SEQ ID NO: 4, with:
the feruloyl esterase A of A. niger represented by SEQ ID NO: 10, said fusion protein being represented by SEQ ID NO: 30,
the feruloyl esterase A of A. niger represented by SEQ ID NO: 10, said fusion protein comprising the sequence represented by SEQ ID NO: 28 as a hyperglycosylated linker between SEQ ID NO: 4 and SEQ ID NO: 10, and being represented by SEQ ID NO: 32,
the feruloyl esterase B of A. niger represented by SEQ ID NO: 12, said fusion protein being represented by SEQ ID NO: 34, the feruloyl esterase B of A. niger represented by SEQ ID NO: 12, said fusion protein comprising the sequence represented by SEQ ID NO: 28 as a hyperglycosylated linker between or SEQ ID NO: 4 and SEQ ID NO: 12, and being represented by SEQ ID NO: 36,
the-xylanase B of A. niger represented by SEQ ID NO: 14, said fusion protein being represented by SEQ ID NO: 38,
the xylanase B of A. niger represented by SEQ ID NO: 14, said fusion protein comprising the sequence represented by SEQ ID NO: 28 as a hyperglycosylated linker between SEQ ID NO: 4 and SEQ ID NO: 14, and being represented by SEQ ID NO: 40,
the cellobiohydrolase I of T. reesei represented by SEQ ID NO: 16, said fusion protein being represented by SEQ ID NO: 42,
the cellobiohydrolase I of T. reesei represented by SEQ ID NO: 16, said fusion protein comprising the sequence represented by SEQ ID NO: 28 as a hyperglycosylated linker between SEQ ID NO: 4 and SEQ ID NO: 16, and being represented by SEQ ID NO: 44,
the cellobiohydrolase I of T. reesei without its endogenous CBM represented by SEQ ID NO: 18, said fusion protein being represented by SEQ ID NO: 46,
the cellobiohydrolase I of T. reesei without its endogenous CBM represented by SEQ ID NO: 18, said fusion protein comprising the sequence represented by SEQ ID NO: 28 as a hyperglycosylated linker between SEQ ID NO: 4 and SEQ ID NO: 18, and being represented by SEQ ID NO: 48,
the cellobiohydrolase II of T. reesei by SEQ ID NO: 20, said fusion protein being represented by SEQ ID NO: 50,
the cellobiohydrolase II of T. reesei represented by SEQ ID NO: 20, said fusion protein comprising the sequence represented by SEQ ID NO: 28 as a hyperglycosylated linker between SEQ ID NO: 4 and SEQ ID NO: 20, and being represented by SEQ ID NO: 52,
the cellobiohydrolase II of T. reesei without its endogenous CBM represented by SEQ ID NO: 22, said fusion protein being represented by SEQ ID NO: 54,
the cellobiohydrolase II of T. reesei without its endogenous CBM represented by SEQ ID NO: 22, said fusion protein comprising the sequence represented by SEQ ID NO: 28 as a hyperglycosylated linker between SEQ ID NO: 4 and SEQ ID NO: 22, and being represented by SEQ ID NO: 56,
the endoglucanase I of T. reesei represented by SEQ ID NO: 24, said fusion protein being represented by SEQ ID NO: 58,
the endoglucanase I of T. reesei represented by SEQ ID NO: 24, said fusion protein comprising the sequence represented by SEQ ID NO: 28 as a hyperglycosylated linker between SEQ ID NO: 4 and SEQ ID NO: 24, and being represented by SEQ ID NO: 60,
the endoglucanase I of T. reesei without its endogenous CBM represented by SEQ ID NO: 26, said fusion protein being represented by SEQ ID NO: 62,
the endoglucanase I of T. reesei without its endogenous CBM represented by SEQ ID NO: 26, said fusion protein comprising the sequence represented by SEQ ID NO: 28 as a hyperglycosylated linker between SEQ ID NO: 4 and SEQ ID NO: 26, and being represented by SEQ ID NO: 64.

21. Fusion proteins according to claim 1, chosen among the fusion proteins of the swollenin of Aspergillus fumigatus represented by SEQ ID NO: 8, with:
the feruloyl esterase A of A. niger represented by SEQ ID NO: 10, said fusion protein being represented by SEQ ID NO: 66,
the feruloyl esterase A of A. niger represented by
SEQ ID NO: 10, said fusion protein comprising the sequence represented by SEQ ID No: 28 as a hyperglycosylated linker between SEQ ID NO: 8 and SEQ ID NO: 10, and being represented by SEQ ID NO: 68,
the feruloyl esterase B of A. niger represented by SEQ ID NO: 12, said fusion protein being represented by SEQ ID NO: 70,
the feruloyl esterase B of A. niger represented by
SEQ ID NO: 12, said fusion protein comprising the sequence represented by SEQ ID NO: 28 as a hyperglycosylated linker between or SEQ ID NO: 8 and SEQ ID NO: 12, and being represented by SEQ ID NO: 72,
the-xylanase B of A. niger represented by SEQ ID NO: 14, said fusion protein being represented by SEQ ID NO: 74,
the xylanase B of A. niger represented by SEQ ID NO: 14, said fusion protein comprising the sequence represented by SEQ ID NO: 28 as a hyperglycosylated linker between SEQ ID NO: 8 and SEQ ID NO: 14, and being represented by SEQ ID NO: 76,
the cellobiohydrolase I of T. reesei represented by SEQ ID NO: 16, said fusion protein being represented by SEQ ID NO: 78,
the cellobiohydrolase I of T. reesei represented by SEQ ID NO: 16, said fusion protein comprising the sequence represented by SEQ ID NO: 28 as a hyperglycosylated linker between SEQ ID NO: 8 and SEQ ID NO: 16, and being represented by SEQ ID NO: 80,
the cellobiohydrolase I of T. reesei without its endogenous CBM represented by SEQ ID NO: 18, said fusion protein being represented by SEQ ID NO: 82,
the cellobiohydrolase I of T. reesei without its endogenous CBM represented by SEQ ID NO: 18, said fusion protein comprising the sequence represented by SEQ ID NO: 28 as a hyperglycosylated linker between SEQ ID NO: 8 and SEQ ID NO: 18, and being represented by SEQ ID NO: 84,
the cellobiohydrolase II of T. reesei by SEQ ID NO: 20, said fusion protein being represented by SEQ ID NO: 86,
the cellobiohydrolase II of T. reesei represented by SEQ ID NO: 20, said fusion protein comprising the sequence represented by SEQ ID NO: 28 as a hyperglycosylated linker between SEQ ID NO: 8 and SEQ ID NO: 20, and being represented by SEQ ID NO: 88,
the cellobiohydrolase II of T. reesei without its endogenous CBM represented by SEQ ID NO: 22, said fusion protein being represented by SEQ ID NO: 90,
the cellobiohydrolase II of T. reesei without its endogenous CBM represented by SEQ ID NO: 22, said fusion protein comprising the sequence represented by SEQ ID NO: 28 as a hyperglycosylated linker between SEQ ID NO: 8 and SEQ ID NO: 22, and being represented by SEQ ID NO: 92,
the endoglucanase I of T. reesei represented by SEQ ID NO: 24, said fusion protein being represented by SEQ ID NO: 94,
the endoglucanase I of T. reesei represented by SEQ ID NO: 24, said fusion protein comprising the sequence represented by SEQ ID NO: 28 as a hyperglycosylated linker between SEQ ID NO: 8 and SEQ ID NO: 24, and being represented by SEQ ID NO: 96,
the endoglucanase I of T. reesei without its endogenous CBM represented by SEQ ID NO: 26, said fusion protein being represented by SEQ ID NO: 98,
the endoglucanase I of T. reesei without its endogenous CBM represented by SEQ ID NO: 26, said fusion protein comprising the sequence represented by SEQ ID NO: 28 as a hyperglycosylated linker between SEQ ID NO: 4 and SEQ ID NO: 26, and being represented by SEQ ID NO: 100.

22. Nucleic acids encoding a fusion protein as defined in claim 1.

23. Vectors transformed with a nucleic acid as defined in claim 22.

24. Host cells transformed with a nucleic acid as defined in claim 22.

25. Transformed host cells according to claim 24, chosen among fungi cells, selected from A. niger, A. fumigatus, Trichoderma reesei, or Pycnoporus cinnabarinus.

26. Process for the preparation of fusion proteins, comprising the culture in vitro of host cells according to claim 24, the recovery, and if necessary, the purification of the fusion proteins produced by said host cells in culture.

27-28. (canceled)

29. Process of plant cell-wall degradation in the frame of the preparation, from plants or vegetal by-products, of compounds of interest located in plant cell-wall, characterized in that it comprises the following steps: the enzymatic treatment of plants or vegetal by-products or industrial waste, with fusion proteins according to claim 1,
optionally, the physical treatment of plants or vegetal by-products by steam explosion in combination with the action of fusion proteins,
optionally, the biotransformation with appropriate microorganisms or enzymes of the compounds contained in the cell walls and released during the above enzymatic treatment,
the recovery, and if necessary, the purification, of the compound of interest released from the cell walls during the above enzymatic treatment or obtained during the above biotransformation step.

The application's sequence listing, which the Patent Office published only in electronic form, follows.

SEQUENCE LISTING (109 sequences)

SEQ ID NO: 1 - DNA, 1479 bp, Trichoderma reesei
  CDS (1)..(1479)
atggctggtaagcttatcctcgtggctctagcaagccttgtatcactctctattcagcagaattgcgcagcattatttggccaatgtggaggcatagggtggtccggcaccacatgttgcgttgctggcgcccagtgcagttttgtcaatgactggtactcccagtgccttgcgtcaaccggcggaaaccccccaaacggaacaacttcctctagcttggtttcacggacgtcgtcagcatcctcatccgtcggctcgtcttcacccggcggcaactcaccaactggcagtgcttccacctacacaaccacagatacagctaccgtggctcctcattcgcagtctccttaccccagcattgccgcatccagttgcggatcgtggaccctcgtggataatgtttgctgcccatcatattgtgctaatgatgacacatccgagtcatgctcaggctgcggtacctgcactacgccgccctcggcggactgcaaatccggaaccatgtatccagaggtccatcacgtatccagcaacgagagctggcactacagtagatcaacccactttggcctaacgagcggcggggcctgtggctttggcctgtacggtctctgcacaaagggcagtgttacagccagctggacggatcccatgcttggcgcgacgtgtgacgctttttgtacagcgtatcccctgctttgcaaagaccctaccggcactacccttcgtggcaacttcgcagctccaaacggcgattactacacccaattctggtcctcgttgccaggagccctcgataactacctgtcctgcggcgagtgcattgagctgatacaaacaaagcccgatgggaccgattatgctgtcggagaagccggctacacggatccaattactctcgagattgtggacagctgcccgtgcagcgcgaactccaagtggtgctgtggtccgggcgccgatcattgcggagagatcgacttcaaatacggctgtcctcttcctgctgacagcattcatctcgacctgtcagacattgccatgggccgtttgcagggcaatggatcactaaccaatggcgtcatcccgactcgatatagaagagtccaatgccccaaagttgggaacgcctacatttggcttcgaaatggcggagggccttactattttgctctcacggcagtcaacaccaacggaccgggctcagtcaccaaaatcgagatcaagggcgcagacaccgacaactgggttgccttggtccatgacccaaactatacgagtagccgcccacaagaacgctatggcagttgggtaatcccacagggatcagggccctttaacttgcctgttggaattcgtctgactagcccaacgggggaacagattgtgaatgaacaggccatcaagacattcactcctccggccacaggtgaccccaatttttactacattgacattggtgtgcagtttagccagaat

SEQ ID NO: 2 - protein, 493 aa, Trichoderma reesei
MAGKLILVALASLVSLSIQQNCAALFGQCGGIGWSGTTCCVAGAQCSFVNDWYSQCLASTGGNPPNGTTSSSLVSRTSSASSSVGSSSPGGNSPTGSASTYTTTDTATVAPHSQSPYPSIAASSCGSWTLVDNVCCPSYCANDDTSESCSGCGTCTTPPSADCKSGTMYPEVHHVSSNESWHYSRSTHFGLTSGGACGFGLYGLCTKGSVTASWTDPMLGATCDAFCTAYPLLCKDPTGTTLRGNFAAPNGDYYTQFWSSLPGALDNYLSCGECIELIQTKPDGTDYAVGEAGYTDPITLEIVDSCPCSANSKWCCGPGADHCGEIDFKYGCPLPADSIHLDLSDIAMGRLQGNGSLTNGVIPTRYRRVQCPKVGNAYIWLRNGGGPYYFALTAVNTNGPGSVTKIEIKGADTDNWVALVHDPNYTSSRPQERYGSWVIPQGSGPFNLPVGIRLTSPTGEQIVNEQAIKTFTPPATGDPNFYYIDIGVQFSQN

SEQ ID NO: 3 - DNA, 1425 bp, Trichoderma reesei
  CDS (1)..(1425)
cagcagaattgcgcagcattatttggccaatgtggaggcatagggtggtccggcaccacatgttgcgttgctggcgcccagtgcagttttgtcaatgactggtactcccagtgccttgcgtcaaccggcggaaaccccccaaacggaacaacttcctctagcttggtttcacggacgtcgtcagcatcctcatccgtcggctcgtcttcacccggcggcaactcaccaactggcagtgcttccacctacacaaccacagatacagctaccgtggctcctcattcgcagtctccttaccccagcattgccgcatccagttgcggatcgtggaccctcgtggataatgtttgctgcccatcatattgtgctaatgatgacacatccgagtcatgctcaggctgcggtacctgcactacgccgccctcggcggactgcaaatccggaaccatgtatccagaggtccatcacgtatccagcaacgagagctggcactacagtagatcaacccactttggcctaacgagcggcggggcctgtggctttggcctgtacggtctctgcacaaagggcagtgttacagccagctggacggatcccatgcttggcgcgacgtgtgacgctttttgtacagcgtatcccctgctttgcaaagaccctaccggcactacccttcgtggcaacttcgcagctccaaacggcgattactacacccaattctggtcctcgttgccaggagccctcgataactacctgtcctgcggcgagtgcattgagctgatacaaacaaagcccgatgggaccgattatgctgtcggagaagccggctacacggatccaattactctcgagattgtggacagctgcccgtgcagcgcgaactccaagtggtgctgtggtccgggcgccgatcattgcggagagatcgacttcaaatacggctgtcctcttcctgctgacagcattcatctcgacctgtcagacattgccatgggccgtttgcagggcaatggatcactaaccaatggcgtcatcccgactcgatatagaagagtccaatgccccaaagttgggaacgcctacatttggcttcgaaatggcggagggccttactattttgctctcacggcagtcaacaccaacggaccgggctcagtcaccaaaatcgagatcaagggcgcagacaccgacaactgggttgccttggtccatgacccaaactatacgagtagccgcccacaagaacgctatggcagttgggtaatcccacagggatcagggccctttaacttgcctgttggaattcgtctgactagcccaacgggggaacagattgtgaatgaacaggccatcaagacattcactcctccggccacaggtgaccccaatttttactacattgacattggtgtgcagtttagccagaat

SEQ ID NO: 4 - protein, 475 aa, Trichoderma reesei
QQNCAALFGQCGGIGWSGTTCCVAGAQCSFVNDWYSQCLASTGGNPPNGTTSSSLVSRTSSASSSVGSSSPGGNSPTGSASTYTTTDTATVAPHSQSPYPSIAASSCGSWTLVDNVCCPSYCANDDTSESCSGCGTCTTPPSADCKSGTMYPEVHHVSSNESWHYSRSTHFGLTSGGACGFGLYGLCTKGSVTASWTDPMLGATCDAFCTAYPLLCKDPTGTTLRGNFAAPNGDYYTQFWSSLPGALDNYLSCGECIELIQTKPDGTDYAVGEAGYTDPITLEIVDSCPCSANSKWCCGPGADHCGEIDFKYGCPLPADSIHLDLSDIAMGRLQGNGSLTNGVIPTRYRRVQCPKVGNAYIWLRNGGGPYYFALTAVNTNGPGSVTKIEIKGADTDNWVALVHDPNYTSSRPQERYGSWVIPQGSGPFNLPVGIRLTSPTGEQIVNEQAIKTFTPPATGDPNFYYIDIGVQFSQN

SEQ ID NO: 5 - DNA, 1503 bp, Aspergillus fumigatus
  CDS (1)..(1503)
atgactcttctatttggtatatttcttgcccggcttgcggtggctgccgcccagagcagctgcgtctcggcttggggtcaatgtggcggtatttcttataccgggtctacctgctgtcagagtgggaatacctgcgccgagattaactcgtactactaccagtgcataccagcaacagctgtgagtacttcaactaccacagtgacatctccctctagctctggttcgtcttctgccaacacgtcaggttatacaacgacgactgtcttgcccagtcccacggcaacacagaacccttatcctccggccaatgccagctcatgtggatcgtgggctctcgttgataacgtttgctgcccatactactgtctctcggataatgaatccgagtcctgcacgagcagctgtaccggcggctgcggcagtcctgattcctccatgtgcaagtccgggacgatgtggggagagcaacacaccgtaacttccaacgaggactggcattacagccgctcaacacactttggtctgaccagcggtggcgcctgcgggttcggtctgtacggcctctgcaccaagaacagtgtcaccgcgagctggacagacccaatgctgggctctacctgcgacgccttctgcaccgcgtatccgctcctctgcaaagaccccgctaacgtcactctccgcgggaactttgctgccccgaacggagactactacactcagttctggccttccctggctgcatccggcaatcccgacaactacctctcttgcggggagtgtttcgaggtcatccgcaccaagcccgacgggacagactacgccgtcggcgagagcggatataccgaccccatagtcctcgaggtagtagacagctgtccctgcaatgccaattcaaaatggtgctgtaagcggccccccccccccccctttttttccccgccttccaacggacaaaatctcacaagaccaggcggcagcggcgcagaccactgcggcgaaatcgacttcaagtacggctgtcctctgccggaaggatcccatcacatggacctctccgatattgccatgggccgactccagggaaacggcagtctcgccgacggtgtgattcccatccgctaccggcgtgtcccctgtcccaagccggggaacatctacatctggcttcatgatggggcgggaccgtattattttgcgctgagcgcggtcaataccaacggccccggctccgtaatcagtatcgaagtccaggctggtggctccgggccatgggttgccctcgagcacgatccgaactacaccagtagccggccgcaggagcggtatggctcttgggtcctcccgcagggcaagggacccattactgtgcctgtttcgatgaggctgacggcgcccaatgggcagcaggtggttaaggagggcgccattaccagctataccccgccggcgactgcggtcgagggcttttggtatattgatctgggagtgcagttcacctag

SEQ ID NO: 6 - protein, 500 aa, Aspergillus fumigatus
MTLLFGIFLARLAVAAAQSSCVSAWGQCGGISYTGSTCCQSGNTCAEINSYYYQCIPATAVSTSTTTVTSPSSSGSSSANTSGYTTTTVLPSPTATQNPYPPANASSCGSWALVDNVCCPYYCLSDNESESCTSSCTGGCGSPDSSMCKSGTMWGEQHTVTSNEDWHYSRSTHFGLTSGGACGFGLYGLCTKNSVTASWTDPMLGSTCDAFCTAYPLLCKDPANVTLRGNFAAPNGDYYTQFWPSLAASGNPDNYLSCGECFEVIRTKPDGTDYAVGESGYTDPIVLEVVDSCPCNANSKWCCKRPPPPPFFSPPSNGQNLTRPGGSGADHCGEIDFKYGCPLPEGSHHMDLSDIAMGRLQGNGSLADGVIPIRYRRVPCPKPGNIYIWLHDGAGPYYFALSAVNTNGPGSVISIEVQAGGSGPWVALEHDPNYTSSRPQERYGSWVLPQGKGPITVPVSMRLTAPNGQQVVKEGAITSYTPPATAVEGFWYIDLGVQFT

SEQ ID NO: 7 - DNA, 1449 bp, Aspergillus fumigatus
  CDS (1)..(1449)
cagagcagctgcgtctcggcttggggtcaatgtggcggtatttcttataccgggtctacctgctgtcagagtgggaatacctgcgccgagattaactcgtactactaccagtgcataccagcaacagctgtgagtacttcaactaccacagtgacatctccctctagctctggttcgtcttctgccaacacgtcaggttatacaacgacgactgtcttgcccagtcccacggcaacacagaacccttatcctccggccaatgccagctcatgtggatcgtgggctctcgttgataacgtttgctgcccatactactgtctctcggataatgaatccgagtcctgcacgagcagctgtaccggcggctgcggcagtcctgattcctccatgtgcaagtccgggacgatgtggggagagcaacacaccgtaacttccaacgaggactggcattacagccgctcaacacactttggtctgaccagcggtggcgcctgcgggttcggtctgtacggcctctgcaccaagaacagtgtcaccgcgagctggacagacccaatgctgggctctacctgcgacgccttctgcaccgcgtatccgctcctctgcaaagaccccgctaacgtcactctccgcgggaactttgctgccccgaacggagactactacactcagttctggccttccctggctgcatccggcaatcccgacaactacctctcttgcggggagtgtttcgaggtcatccgcaccaagcccgacgggacagactacgccgtcggcgagagcggatataccgaccccatagtcctcgaggtagtagacagctgtccctgcaatgccaattcaaaatggtgctgtaagcggccccccccccccccctttttttccccgccttccaacggacaaaatctcacaagaccaggcggcagcggcgcagaccactgcggcgaaatcgacttcaagtacggctgtcctctgccggaaggatcccatcacatggacctctccgatattgccatgggccgactccagggaaacggcagtctcgccgacggtgtgattcccatccgctaccggcgtgtcccctgtcccaagccggggaacatctacatctggcttcatgatggggcgggaccgtattattttgcgctgagcgcggtcaataccaacggccccggctccgtaatcagtatcgaagtccaggctggtggctccgggccatgggttgccctcgagcacgatccgaactacaccagtagccggccgcaggagcggtatggctcttgggtcctcccgcagggcaagggacccattactgtgcctgtttcgatgaggctgacggcgcccaatgggcagcaggtggttaaggagggcgccattaccagctataccccgccggcgactgcggtcgagggcttttggtatattgatctgggagtgcagttcacc

SEQ ID NO: 8 - protein, 483 aa, Aspergillus fumigatus
QSSCVSAWGQCGGISYTGSTCCQSGNTCAEINSYYYQCIPATAVSTSTTTVTSPSSSGSSSANTSGYTTTTVLPSPTATQNPYPPANASSCGSWALVDNVCCPYYCLSDNESESCTSSCTGGCGSPDSSMCKSGTMWGEQHTVTSNEDWHYSRSTHFGLTSGGACGFGLYGLCTKNSVTASWTDPMLGSTCDAFCTAYPLLCKDPANVTLRGNFAAPNGDYYTQFWPSLAASGNPDNYLSCGECFEVIRTKPDGTDYAVGESGYTDPIVLEVVDSCPCNANSKWCCKRPPPPPFFSPPSNGQNLTRPGGSGADHCGEIDFKYGCPLPEGSHHMDLSDIAMGRLQGNGSLADGVIPIRYRRVPCPKPGNIYIWLHDGAGPYYFALSAVNTNGPGSVISIEVQAGGSGPWVALEHDPNYTSSRPQERYGSWVLPQGKGPITVPVSMRLTAPNGQQVVKEGAITSYTPPATAVEGFWYIDLGVQFT

SEQ ID NO: 9 - DNA, 780 bp, Aspergillus niger
  CDS (1)..(780)
gcctccacgcaaggcatctccgaagacctctacaatcgcttggtagagatggccactatctcccaagccgcctacgccgacctatgcaatattccatcgactattatcaaaggagagaaaatttacaacgctcaaactgatatcaacggatggatcctccgcgacgacaccagcaaagaaattatcaccgtcttccgtggcactggcagtgacacaaacctacagctcgatactaactacacgctcacgccattcgacactctacctcaatgcaacgattgcgaggtacacggtggatactatattggatggatctcagtccaagaccaagtcgagtcgcttgtcaaacaacaggctagccagtatccggactatgcgcttaccgtgacaggccatagtctgggagcgtcgatggcagcactcactgccgcccagctgtccgcgacatacgacaacgtccgtctgtacacattcggcgaaccgcgcagcggcaaccaggccttcgcgtcgtacatgaacgatgcgttccaggtctcgagcccggagacgacccagtacttccgggtcactcattccaacgacggcatcccaaacttgcccccggcggacgagggttacgcccatggtggtgtagagtactggagcgttgatccttacagcgcccagaacacgtttgtctgtactggggatgaagtacagtgctgtgaggcacagggcggacagggggtgaatgatgcgcatactacttattttgggatgacgagcggagcttgtacttgg

SEQ ID NO: 10 - protein, 260 aa, Aspergillus niger
ASTQGISEDLYNRLVEMATISQAAYADLCNIPSTIIKGEKIYNAQTDINGWILRDDTSKEIITVFRGTGSDTNLQLDTNYTLTPFDTLPQCNDCEVHGGYYIGWISVQDQVESLVKQQASQYPDYALTVTGHSLGASMAALTAAQLSATYDNVRLYTFGEPRSGNQAFASYMNDAFQVSSPETTQYFRVTHSNDGIPNLPPADEGYAHGGVEYWSVDPYSAQNTFVCTGDEVQCCEAQGGQGVNDAHTTYFGMTSGACTW

SEQ ID NO: 11 - DNA, 1512 bp, Aspergillus niger
  CDS (1)..(1512)
gcgaccgaccccttccagtcgcggtgcaatgaattccagaacaagatcgacatcgccaatgtcaccgtcagatcggtcgcatacgttgctgctggacagaacatctcccaagcggaggtcgcctccgtgtgtaaagcatcggttcaagccagtgtcgacctgtgccgggtaaccatgaacatctcgacgtcggatcgcagccatctgtgggctgaggcctggctcccaagaaattataccggtcgcttcgtgagcacggggaatggaggtctagccggctgtgtccaagaaacggacctcaactttgcagccaactttggtttcgctaccgtgggcaccaacggtggacatgacggggacacggccaaatacttcctcaacaactcggaggttctggccgattttgcctatcgctcagtgcacgaagggaccgtggtgggtaagcaactaactcaattgttttatgacgagggatacaactactcctactatttgggttgctccaccggaggccgccaaggctaccagcaagtccaacggtttcccgacgactatgacggagtgattgcgggctccgcagcgatgaactttatcaacctgatctcctggggggccttcttgtggaaggcgacggggttagcggatgatccagactttatctctgcaaacctgtggtccgtaatccaccaggagattgttcgtcagtgcgacctggtcgatggggctctggatggaatcatcgaagaccctgatttctgtgctccagtcatcgagcgcttgatctgcgacgggactaccaacggcacctcttgtatcacgggagcccaggcagcaaaggtcaaccgggccttgagtgacttctatggccccgacgggacagtgtactacccgcgcctgaactatgggggtgaggccgactcggcttccctgtacttcacggggtcgatgtacagccgtacggaggaatggtacaaatatgtggtctataacgacaccaactggaactccagccagtggacgctggagagtgccaagctggccctggagcagaatccgttcaatatccaggcgtttgatcccaacatcacggccttccgggaccggggtggcaagctgctgtcctaccacggcacgcaggatcccattatcagctccacggatagcaagctctactaccgacgggtagcgaatgccctgaatgccgcgccgtccgagctagatgagttctatcggttcttccagatctccggcatgggccactgtggcgatggcacgggagcatcgtacatcggccagggatatggcacgtacacctccaaggcgccccaagtcaacctgctgcgcacgatggtggactgggtggaaaacggaaaggcgcccgagtatatgccgggcaacaagctcaacgcgaacgggtcaattgagtacatgcgcaagcactgccggtatccgaagcataacattcacacggggccgggtaactacaccgatcctaactcctggacttgcgta

SEQ ID NO: 12 - protein, 504 aa, Aspergillus niger
ATDPFQSRCNEFQNKIDIANVTVRSVAYVAAGQNISQAEVASVCKASVQASVDLCRVTMNISTSDRSHLWAEAWLPRNYTGRFVSTGNGGLAGCVQETDLNFAANFGFATVGTNGGHDGDTAKYFLNNSEVLADFAYRSVHEGTVVGKQLTQLFYDEGYNYSYYLGCSTGGRQGYQQVQRFPDDYDGVIAGSAAMNFINLISWGAFLWKATGLADDPDFISANLWSVIHQEIVRQCDLVDGALDGIIEDPDFCAPVIERLICDGTTNGTSCITGAQAAKVNRALSDFYGPDGTVYYPRLNYGGEADSASLYFTGSMYSRTEEWYKYVVYNDTNWNSSQWTLESAKLALEQNPFNIQAFDPNITAFRDRGGKLLSYHGTQDPIISSTDSKLYYRRVANALNAAPSELDEFYRFFQISGMGHCGDGTGASYIGQGYGTYTSKAPQVNLLRTMVDWVENGKAPEYMPGNKLNANGSIEYMRKHCRYPKHNIHTGPGNYTDPNSWTCV

SEQ ID NO: 13 - DNA, 564 bp, Aspergillus niger
  CDS (1)..(564)
tcgaccccgagctcgaccggcgagaacaacggcttctactactccttctggaccgacggcggtggagacgtgacctacaccaacggagatgctggtgcctacactgttgagtggtccaacgtgggcaactttgtcggtggaaagggctggaaccccggaagtgcgcaggacatcacctacagcggcaccttcacccctagcggcaacggctacctctccgtctatggctggaccactgaccctctgatcgagtactacatcgtcgagtcttacggcgactacaaccccggcagtggaggcacgtacaagggcaccgtcacctcggacggatccgtttacgatatctacacggctacccgtaccaatgctgcttccattcagggaaccgctaccttcactcagtactggtccgttcgccagaacaagagagttggcggaaccgttaccacctccaaccacttcaatgcttgggctaagctgggaatgaacctgggtactcacaactaccagatcgtggctaccgagggttaccagagcagtggatcttcgtccatcactgttcag

SEQ ID NO: 14 - protein, 188 aa, Aspergillus niger
STPSSTGENNGFYYSFWTDGGGDVTYTNGDAGAYTVEWSNVGNFVGGKGWNPGSAQDITYSGTFTPSGNGYLSVYGWTTDPLIEYYIVESYGDYNPGSGGTYKGTVTSDGSVYDIYTATRTNAASIQGTATFTQYWSVRQNKRVGGTVTTSNHFNAWAKLGMNLGTHNYQIVATEGYQSSGSSSITVQ

SEQ ID NO: 15 - DNA, 1494 bp, Trichoderma reesei
  CDS (1)..(1494)
cagtcggcctgcactctccaatcggagactcacccgcctctgacatggcagaaatgctcgtctggtggcacgtgcactcaacagacaggctccgtggtcatcgacgccaactggcgctggactcacgctacgaacagcagcacgaactgctacgatggcaacacttggagctcgaccctatgtcctgacaacgagacctgcgcgaagaactgctgtctggacggtgccgcctacgcgtccacgtacggagttaccacgagcggtaacagcctctccattggctttgtcacccagtctgcgcagaagaacgttggcgctcgcctttaccttatggcgagcgacacgacctaccaggaattcaccctgcttggcaacgagttctctttcgatgttgatgtttcgcagctgccgtgcggcttgaacggagctctctacttcgtgtccatggacgcggatggtggcgtgagcaagtatcccaccaacaccgctggcgccaagtacggcacggggtactgtgacagccagtgtccccgcgatctgaagttcatcaatggccaggccaacgttgagggctgggagccgtcatccaacaacgcgaacacgggcattggaggacacggaagctgctgctctgagatggatatctgggaggccaactccatctccgaggctcttaccccccacccttgcacgactgtcggccaggagatctgcgagggtgatgggtgcggcggaacttactccgataacagatatggcggcacttgcgatcccgatggctgcgactggaacccataccgcctgggcaacaccagcttctacggccctggctcaagctttaccctcgataccaccaagaaattgaccgttgtcacccagttcgagacgtcgggtgccatcaaccgatactatgtccagaatggcgtcactttccagcagcccaacgccgagcttggtagttactctggcaacgagctcaacgatgattactgcacagctgaggaggcagaattcggcggatcctctttctcagacaagggcggcctgactcagttcaagaaggctacctctggcggcatggttctggtcatgagtctgtgggatgattactacgccaacatgctgtggctggactccacctacccgacaaacgagacctcctccacacccggtgccgtgcgcggaagctgctccaccagctccggtgtccctgctcaggtcgaatctcagtctcccaacgccaaggtcaccttctccaacatcaagttcggacccattggcagcaccggcaaccctagcggcggcaaccctcccggcggaaacccgcctggcaccaccaccacccgccgcccagccactaccactggaagctctcccggacctacccagtctcactacggccagtgcggcggtattggctacagcggccccacggtctgcgccagcggcacaacttgccaggtcctgaacccttactactctcagtgcctgtaa

SEQ ID NO: 16 - protein, 497 aa, Trichoderma reesei [sequence omitted]

SEQ ID NO: 17 - DNA, 1494 bp, Trichoderma reesei; identical to SEQ ID NO: 15
  CDS (1)..(1494)

SEQ ID NO: 18 - protein, 497 aa, Trichoderma reesei [sequence omitted]

SEQ ID NO: 19 - DNA, 1344 bp, Trichoderma reesei
  CDS (1)..(1344)
caagcttgctcaagcgtctggggccaatgtggtggccagaattggtcgggtccgacttgctgtgcttccggaagcacatgcgtctactccaacgactattactcccagtgtcttcccggcgctgcaagctcaagctcgtccacgcgcgccgcgtcgacgacttctcgagtatcccccacaacatcccggtcgagctccgcgacgcctccacctggttctactactaccagagtacctccagtcggatcgggaaccgctacgtattcaggcaacccttttgttggggtcactccttgggccaatgcatattacgcctctgaagttagcagcctcgctattcctagcttgactggagccatggccactgctgcagcagctgtcgcaaaggttccctcttttatgtggctagatactcttgacaagacccctctcatggagcaaaccttggccgacatccgcaccgccaacaagaatggcggtaactatgcgggacagtttgtggtgtatgacttgccggatcgcgattgcgctgcccttgcctcgaatggcgaatactctattgccgatggtggcgtcgccaaatataagaactatatcgacaccattcgtcaaattgtcgtggaatattccgatatccggaccctcctggttattgagcctgactctcttgccaacctggtgaccaacctcggtactccaaagtgtgccaatgctcagtcagcctaccttgagtgcatcaactacgccgtcacacagctgaaccttccaaatgttgcgatgtatttggacgctggccatgcaggatggcttggctggccggcaaaccaagacccggccgctcagctatttgcaaatgtttacaagaatgcatcgtctccgagagctcttcgcggattggcaaccaatgtcgccaactacaacgggtggaacattaccagccccccatcgtacacgcaaggcaacgctgtctacaacgagaagctgtacatccacgctattggacgtcttcttgccaatcacggctggtccaacgccttcttcatcactgatcaaggtcgatcgggaaagcagcctaccggacagcaacagtggggagactggtgcaatgtgatcggcaccggatttggtattcgcccatccgcaaacactggggactcgttgctggattcgtttgtctgggtcaagccaggcggcgagtgtgacggcaccagcgacagcagtgcgccacgatttgactcccactgtgcgctcccagatgccttgcaaccggcggctcaagctggtgcttggttccaagcctactttgtgcagcttctcacaaacgcaaacccatcgttcctgtaa

SEQ ID NO: 20 - protein, 447 aa, Trichoderma reesei
QACSSVWGQCGGQNWSGPTCCASGSTCVYSNDYYSQCLPGAASSSSSTRAASTTSRVSPTTSRSSSATPPPGSTTTRVPPVGSGTATYSGNPFVGVTPWANAYYASEVSSLAIPSLTGAMATAAAAVAKVPSFMWLDTLDKTPLMEQTLADIRTANKNGGNYAGQFVVYDLPDRDCAALASNGEYSIADGGVAKYKNYIDTIRQIVVEYSDIRTLLVIEPDSLANLVTNLGTPKCANAQSAYLECINYAVTQLNLPNVAMYLDAGHAGWLGWPANQDPAAQLFANVYKNASSPRALRGLATNVANYNGWNITSPPSYTQGNAVYNEKLYIHAIGRLLANHGWSNAFFITDQGRSGKQPTGQQQWGDWCNVIGTGFGIRPSANTGDSLLDSFVWVKPGGECDGTSDSSAPRFDSHCALPDALQPAAQAGAWFQAYFVQLLTNANPSFL

SEQ ID NO: 21 - DNA, 1230 bp, Trichoderma reesei
  CDS (1)..(1230)
cccggcgctgcaagctcaagctcgtccacgcgcgccgcgtcgacgacttctcgagtatcccccacaacatcccggtcgagctccgcgacgcctccacctggttctactactaccagagtacctccagtcggatcgggaaccgctacgtattcaggcaacccttttgttggggtcactccttgggccaatgcatattacgcctctgaagttagcagcctcgctattcctagcttgactggagccatggccactgctgcagcagctgtcgcaaaggttccctcttttatgtggctagatactcttgacaagacccctctcatggagcaaaccttggccgacatccgcaccgccaacaagaatggcggtaactatgcgggacagtttgtggtgtatgacttgccggatcgcgattgcgctgcccttgcctcgaatggcgaatactctattgccgatggtggcgtcgccaaatataagaactatatcgacaccattcgtcaaattgtcgtggaatattccgatatccggaccctcctggttattgagcctgactctcttgccaacctggtgaccaacctcggtactccaaagtgtgccaatgctcagtcagcctaccttgagtgcatcaactacgccgtcacacagctgaaccttccaaatgttgcgatgtatttggacgctggccatgcaggatggcttggctggccggcaaaccaagacccggccgctcagctatttgcaaatgtttacaagaatgcatcgtctccgagagctcttcgcggattggcaaccaatgtcgccaactacaacgggtggaacattaccagccccccatcgtacacgcaaggcaacgctgtctacaacgagaagctgtacatccacgctattggacgtcttcttgccaatcacggctggtccaacgccttcttcatcactgatcaaggtcgatcgggaaagcagcctaccggacagcaacagtggggagactggtgcaatgtgatcggcaccggatttggtattcgcccatccgcaaacactggggactcgttgctggattcgtttgtctgggtcaagccaggcggcgagtgtgacggcaccagcgacagcagtgcgccacgatttgactcccactgtgcgctcccagatgccttgcaaccggcggctcaagctggtgcttggttccaagcctactttgtgcagcttctcacaaacgcaaacccatcgttcctgtaa

SEQ ID NO: 22 - protein, 409 aa, Trichoderma reesei
PGAASSSSSTRAASTTSRVSPTTSRSSSATPPPGSTTTRVPPVGSGTATYSGNPFVGVTPWANAYYASEVSSLAIPSLTGAMATAAAAVAKVPSFMWLDTLDKTPLMEQTLADIRTANKNGGNYAGQFVVYDLPDRDCAALASNGEYSIADGGVAKYKNYIDTIRQIVVEYSDIRTLLVIEPDSLANLVTNLGTPKCANAQSAYLECINYAVTQLNLPNVAMYLDAGHAGWLGWPANQDPAAQLFANVYKNASSPRALRGLATNVANYNGWNITSPPSYTQGNAVYNEKLYIHAIGRLLANHGWSNAFFITDQGRSGKQPTGQQQWGDWCNVIGTGFGIRPSANTGDSLLDSFVWVKPGGECDGTSDSSAPRFDSHCALPDALQPAAQAGAWFQAYFVQLLTNANPSFL

SEQ ID NO: 23 - DNA, 1314 bp, Trichoderma reesei
  CDS (1)..(1314)
cagcaaccgggtaccagcacccccgaggtccatcccaagttgacaacctacaagtgtacaaagtccggggggtgcgtggcccaggacacctcggtggtccttgactggaactaccgctggatgcacgacgcaaactacaactcgtgcaccgtcaacggcggcgtcaacaccacgctctgccctgacgaggcgacctgtggcaagaactgcttcatcgagggcgtcgactacgccgcctcgggcgtcacgacctcgggcagcagcctcaccatgaaccagtacatgcccagcagctctggcggctacagcagcgtctctcctcggctgtatctcctggactctgacggtgagtacgtgatgctgaagctcaacggccaggagctgagcttcgacgtcgacctctctgctctgccgtgtggagagaacggctcgctctacctgtctcagatggacgagaacgggggcgccaaccagtataacacggccggtgccaactacgggagcggctactgcgatgctcagtgccccgtccagacatggaggaacggcaccctcaacactagccaccagggcttctgctgcaacgagatggatatcctggagggcaactcgagggcgaatgccttgacccctcactcttgcacggccacggcctgcgactctgccggttgcggcttcaacccctatggcagcggctacaaaagctactacggccccggagataccgttgacacctccaagaccttcaccatcatcacccagttcaacacggacaacggctcgccctcgggcaaccttgtgagcatcacccgcaagtaccagcaaaacggcgtcgacatccccagcgcccagcccggcggcgacaccatctcgtcctgcccgtccgcctcagcctacggcggcctcgccaccatgggcaaggccctgagcagcggcatggtgctcgtgttcagcatttggaacgacaacagccagtacatgaactggctcgacagcggcaacgccggcccctgcagcagcaccgagggcaacccatccaacatcctggccaacaaccccaacacgcacgtcgtcttctccaacatccgctggggagacattgggtctactacgaactcgactgcgcccccgcccccgcctgcgtccagcacgacgttttcgactacacggaggagctcgacgacttcgagcagcccgagctgcacgcagactcactgggggcagtgcggtggcattgggtacagcgggtgcaagacgtgcacgtcgggcactacgtgccagtatagcaacgactactactcgcaatgcctttag

SEQ ID NO: 24 - protein, 437 aa, Trichoderma reesei
QQPGTSTPEVHPKLTTYKCTKSGGCVAQDTSVVLDWNYRWMHDANYNSCTVNGGVNTTLCPDEATCGKNCFIEGVDYAASGVTTSGSSLTMNQYMPSSSGGYSSVSPRLYLLDSDGEYVMLKLNGQELSFDVDLSALPCGENGSLYLSQMDENGGANQYNTAGANYGSGYCDAQCPVQTWRNGTLNTSHQGFCCNEMDILEGNSRANALTPHSCTATACDSAGCGFNPYGSGYKSYYGPGDTVDTSKTFTIITQFNTDNGSPSGNLVSITRKYQQNGVDIPSAQPGGDTISSCPSASAYGGLATMGKALSSGMVLVFSIWNDNSQYMNWLDSGNAGPCSSTEGNPSNILANNPNTHVVFSNIRWGDIGSTTNSTAPPPPPASSTTFSTTRRSSTTSSSPSCTQTHWGQCGGIGYSGCKTCTSGTTCQYSNDYYSQCL

SEQ ID NO: 25 - DNA, 1200 bp, Trichoderma reesei
  CDS (1)..(1200)
cagcaaccgggtaccagcacccccgaggtccatcccaagttgacaacctacaagtgtacaaagtccggggggtgcgtggcccaggacacctcggtggtccttgactggaactaccgctggatgcacgacgcaaactacaactcgtgcaccgtcaacggcggcgtcaacaccacgctctgccctgacgaggcgacctgtggcaagaactgcttcatcgagggcgtcgactacgccgcctcgggcgtcacgacctcgggcagcagcctcaccatgaaccagtacatgcccagcagctctggcggctacagcagcgtctctcctcggctgtatctcctggactctgacggtgagtacgtgatgctgaagctcaacggccaggagctgagcttcgacgtcgacctctctgctctgccgtgtggagagaacggctcgctctacctgtctcagatggacgagaacgggggcgccaaccagtataacacggccggtgccaactacgggagcggctactgcgatgctcagtgccccgtccagacatggaggaacggcaccctcaacactagccaccagggcttctgctgcaacgagatggatatcctggagggcaactcgagggcgaatgccttgacccctcactcttgcacggccacggcctgcgactctgccggttgcggcttcaacccctatggcagcggctacaaaagctactacggccccggagataccgttgacacctccaagaccttcaccatcatcacccagttcaacacggacaacggctcgccctcgggcaaccttgtgagcatcacccgcaagtaccagcaaaacggcgtcgacatccccagcgcccagcccggcggcgacaccatctcgtcctgcccgtccgcctcagcctacggcggcctcgccaccatgggcaaggccctgagcagcggcatggtgctcgtgttcagcatttggaacgacaacagccagtacatgaactggctcgacagcggcaacgccggcccctgcagcagcaccgagggcaacccatccaacatcctggccaacaaccccaacacgcacgtcgtcttctccaacatccgctggggagacattgggtctactacgaactcgactgcgcccccgcccccgcctgcgtccagcacgacgttttcgactacacggaggagctcgacgacttcgagcagcccgagc

SEQ ID NO: 26 - protein, 400 aa, Trichoderma reesei
QQPGTSTPEVHPKLTTYKCTKSGGCVAQDTSVVLDWNYRWMHDANYNSCTVNGGVNTTLCPDEATCGKNCFIEGVDYAASGVTTSGSSLTMNQYMPSSSGGYSSVSPRLYLLDSDGEYVMLKLNGQELSFDVDLSALPCGENGSLYLSQMDENGGANQYNTAGANYGSGYCDAQCPVQTWRNGTLNTSHQGFCCNEMDILEGNSRANALTPHSCTATACDSAGCGFNPYGSGYKSYYGPGDTVDTSKTFTIITQFNTDNGSPSGNLVSITRKYQQNGVDIPSAQPGGDTISSCPSASAYGGLATMGKALSSGMVLVFSIWNDNSQYMNWLDSGNAGPCSSTEGNPSNILANNPNTHVVFSNIRWGDIGSTTNSTAPPPPPASSTTFSTTRRSSTTSSSPS

SEQ ID NO: 27 - DNA, 138 bp, Trichoderma reesei
  CDS (1)..(138)
ggctcgacttactccagtggatcttcttcggggtcggggtctagctccagctcgagttcgactaccactaaggccacttcgacgaccttgaagactacctcgaccaccagcagtggaagcagttcgacatcggcggcg

SEQ ID NO: 28 - protein, 46 aa, Trichoderma reesei
GSTYSSGSSSGSGSSSSSSSTTTKATSTTLKTTSTTSSGSSSTSAA

SEQ ID NO: 29 - DNA, 2205 bp, artificial sequence
  synthetic fusion protein
  CDS (1)..(2205)
cagcagaattgcgcagcattatttggccaatgtggaggcatagggtggtccggcaccacatgttgcgttgctggcgcccagtgcagttttgtcaatgactggtactcccagtgccttgcgtcaaccggcggaaaccccccaaacggaacaacttcctctagcttggtttcacggacgtcgtcagcatcctcatccgtcggctcgtcttcacccggcggcaactcaccaactggcagtgcttccacctacacaaccacagatacagctaccgtggctcctcattcgcagtctccttaccccagcattgccgcatccagttgcggatcgtggaccctcgtggataatgtttgctgcccatcatattgtgctaatgatgacacatccgagtcatgctcaggctgcggtacctgcactacgccgccctcggcggactgcaaatccggaaccatgtatccagaggtccatcacgtatccagcaacgagagctggcactacagtagatcaacccactttggcctaacgagcggcggggcctgtggctttggcctgtacggtctctgcacaaagggcagtgttacagccagctggacggatcccatgcttggcgcgacgtgtgacgctttttgtacagcgtatcccctgctttgcaaagaccctaccggcactacccttcgtggcaacttcgcagctccaaacggcgattactacacccaattctggtcctcgttgccaggagccctcgataactacctgtcctgcggcgagtgcattgagctgatacaaacaaagcccgatgggaccgattatgctgtcggagaagccggctacacggatccaattactctcgagattgtggacagctgcccgtgcagcgcgaactccaagtggtgctgtggtccgggcgccgatcattgcggagagatcgacttcaaatacggctgtcctcttcctgctgacagcattcatctcgacctgtcagacattgccatgggccgtttgcagggcaatggatcactaaccaatggcgtcatcccgactcgatatagaagagtccaatgccccaaagttgggaacgcctacatttggcttcgaaatggcggagggccttactattttgctctcacggcagtcaacaccaacggaccgggctcagtcaccaaaatcgagatcaagggcgcagacaccgacaactgggttgccttggtccatgacccaaactatacgagtagccgcccacaagaacgctatggcagttgggtaatcccacagggatcagggccctttaacttgcctgttggaattcgtctgactagcccaacgggggaacagattgtgaatgaacaggccatcaagacattcactcctccggccacaggtgaccccaatttttactacattgacattggtgtgcagtttagccagaatgcctccacgcaaggcatctccgaagacctctacaatcgcttggtagagatggccactatctcccaagccgcctacgccgacctatgcaatattccatcgactattatcaaaggagagaaaatttacaacgctcaaactgatatcaacggatggatcctccgcgacgacaccagcaaagaaattatcaccgtcttccgtggcactggcagtgacacaaacctacagctcgatactaactacacgctcacgccattcgacactctacctcaatgcaacgattgcgaggtacacggtggatactatattggatggatctcagtccaagaccaagtcgagtcgcttgtcaaacaacaggctagccagtatccggactatgcgcttaccgtgacaggccatagtctgggagcgtcgatggcagcactcactgccgcccagctgtccgcgacatacgacaacgtccgtctgtacacattcggcgaaccgcgcagcggcaaccaggccttcgcgtcgtacatgaacgatgcgttccaggtctcgagcccggagacgacccagtacttccgggtcactcattccaacgacggcatcccaaacttgcccccggcggacgagggttacgcccatggtggtgtagagtactggagcgttgatccttacagcgcccagaacacgtttgtctgtactggggatgaagtacagtgctgtgaggcacagggcggacagggggtgaatgatgcgcatactacttattttgggatgacgagcggagcttgtacttgg

SEQ ID NO: 30 - protein, 735 aa, artificial sequence
  Synthetic Construct
QQNCAALFGQCGGIGWSGTTCCVAGAQCSFVNDWYSQCLASTGGNPPNGTTSSSLVSRTSSASSSVGSSSPGGNSPTGSASTYTTTDTATVAPHSQSPYPSIAASSCGSWTLVDNVCCPSYCANDDTSESCSGCGTCTTPPSADCKSGTMYPEVHHVSSNESWHYSRSTHFGLTSGGACGFGLYGLCTKGSVTASWTDPMLGATCDAFCTAYPLLCKDPTGTTLRGNFAAPNGDYYTQFWSSLPGALDNYLSCGECIELIQTKPDGTDYAVGEAGYTDPITLEIVDSCPCSANSKWCCGPGADHCGEIDFKYGCPLPADSIHLDLSDIAMGRLQGNGSLTNGVIPTRYRRVQCPKVGNAYIWLRNGGGPYYFALTAVNTNGPGSVTKIEIKGADTDNWVALVHDPNYTSSRPQERYGSWVIPQGSGPFNLPVGIRLTSPTGEQIVNEQAIKTFTPPATGDPNFYYIDIGVQFSQNASTQGISEDLYNRLVEMATISQAAYADLCNIPSTIIKGEKIYNAQTDINGWILRDDTSKEIITVFRGTGSDTNLQLDTNYTLTPFDTLPQCNDCEVHGGYYIGWISVQDQVESLVKQQASQYPDYALTVTGHSLGASMAALTAAQLSATYDNVRLYTFGEPRSGNQAFASYMNDAFQVSSPETTQYFRVTHSNDGIPNLPPADEGYAHGGVEYWSVDPYSAQNTFVCTGDEVQCCEAQGGQGVNDAHTTYFGMTSGACTW

SEQ ID NO: 31 - DNA, 2343 bp, artificial sequence
  synthetic fusion protein
  CDS (1)..(2343)
cagcagaattgcgcagcattatttggccaatgtggaggcatagggtggtccggcaccacatgttgcgttgctggcgcccagtgcagttttgtcaatgactggtactcccagtgccttgcgtcaaccggcggaaaccccccaaacggaacaacttcctctagcttggtttcacggacgtcgtcagcatcctcatccgtcggctcgtcttcacccggcggcaactcaccaactggcagtgcttccacctacacaaccacagatacagctaccgtggctcctcattcgcagtctccttaccccagcattgccgcatccagttgcggatcgtggaccctcgtggataatgtttgctgcccatcatattgtgctaatgatgacacatccgagtcatgctcaggctgcggtacctgcactacgccgccctcggcggactgcaaatccggaaccatgtatccagaggtccatcacgtatccagcaacgagagctggcactacagtagatcaacccactttggcctaacgagcggcggggcctgtggctttggcctgtacggtctctgcacaaagggcagtgttacagccagctggacggatcccatgcttggcgcgacgtgtgacgctttttgtacagcgtatcccctgctttgcaaagaccctaccggcactacccttcgtggcaacttcgcagctccaaacggcgattactacacccaattctggtcctcgttgccaggagccctcgataactacctgtcctgcggcgagtgcattgagctgatacaaacaaagcccgatgggaccgattatgctgtcggagaagccggctacacggatccaattactctcgagattgtggacagctgcccgtgcagcgcgaactccaagtggtgctgtggtccgggcgccgatcattgcggagagatcgacttcaaatacggctgtcctcttcctgctgacagcattcatctcgacctgtcagacattgccatgggccgtttgcagggcaatggatcactaaccaatggcgtcatcccgactcgatatagaagagtccaatgccccaaagttgggaacgcctacatttggcttcgaaatggcggagggccttactattttgctctcacggcagtcaacaccaacggaccgggctcagtcaccaaaatcgagatcaagggcgcagacaccgacaactgggttgccttggtccatgacccaaactatacgagtagccgcccacaagaacgctatggcagttgggtaatcccacagggatcagggccctttaacttgcctgttggaattcgtctgactagcccaacgggggaacagattgtgaatgaacaggccatcaagacattcactcctccggccacaggtgaccccaatttttactacattgacattggtgtgcagtttagccagaatggctcgacttactccagtggatcttcttcggggtcggggtctagctccagctcgagttcgactaccactaaggccacttcgacgaccttgaagactacctcgaccaccagcagtggaagcagttcgacatcggcggcggcctccacgcaaggcatctccgaagacctctacaatcgcttggtagagatggccactatctcccaagccgcctacgccgacctatgcaatattccatcgactattatcaaaggagagaaaatttacaacgctcaaactgatatcaacggatggatcctccgcgacgacaccagcaaagaaattatcaccgtcttccgtggcactggcagtgacacaaacctacagctcgatactaactacacgctcacgccattcgacactctacctcaatgcaacgattgcgaggtacacggtggatactatattggatggatctcagtccaagaccaagtcgagtcgcttgtcaaacaacaggctagccagtatccggactatgcgcttaccgtgacaggccatagtctgggagcgtcgatggcagcactcactgccgcccagctgtccgcgacatacgacaacgtccgtctgtacacattcggcgaaccgcgcagcggcaaccaggccttcgcgtcgtacatgaacgatgcgttccaggtctcgagcccggagacgacccagtacttccgggtcactcattccaacgacggcatcccaaacttgcccccggcggacgagggttacgcccatggtggtgtagagtactggagcgttgatccttacagcgcccagaacacgtttgtctgtactggggatgaagtacagtgctgtgaggcacagggcggacagggggtgaatgatgcgcatactacttattttgggatgacgagcggagcttgtacttgg

SEQ ID NO: 32 - protein, 781 aa, artificial sequence
  Synthetic Construct
QQNCAALFGQCGGIGWSGTTCCVAGAQCSFVNDWYSQCLASTGGNPPNGTTSSSLVSRTSSASSSVGSSSPGGNSPTGSASTYTTTDTATVAPHSQSPYPSIAASSCGSWTLVDNVCCPSYCANDDTSESCSGCGTCTTPPSADCKSGTMYPEVHHVSSNESWHYSRSTHFGLTSGGACGFGLYGLCTKGSVTASWTDPMLGATCDAFCTAYPLLCKDPTGTTLRGNFAAPNGDYYTQFWSSLPGALDNYLSCGECIELIQTKPDGTDYAVGEAGYTDPITLEIVDSCPCSANSKWCCGPGADHCGEIDFKYGCPLPADSIHLDLSDIAMGRLQGNGSLTNGVIPTRYRRVQCPKVGNAYIWLRNGGGPYYFALTAVNTNGPGSVTKIEIKGADTDNWVALVHDPNYTSSRPQERYGSWVIPQGSGPFNLPVGIRLTSPTGEQIVNEQAIKTFTPPATGDPNFYYIDIGVQFSQNGSTYSSGSSSGSGSSSSSSSTTTKATSTTLKTTSTTSSGSSSTSAAASTQGISEDLYNRLVEMATISQAAYADLCNIPSTIIKGEKIYNAQTDINGWILRDDTSKEIITVFRGTGSDTNLQLDTNYTLTPFDTLPQCNDCEVHGGYYIGWISVQDQVESLVKQQASQYPDYALTVTGHSLGASMAALTAAQLSATYDNVRLYTFGEPRSGNQAFASYMNDAFQVSSPETTQYFRVTHSNDGIPNLPPADEGYAHGGVEYWSVDPYSAQNTFVCTGDEVQCCEAQGGQGVNDAHTTYFGMTSGACTW

SEQ ID NO: 33 - DNA, 2937 bp, artificial sequence
  synthetic fusion protein
  CDS (1)..(2937)
cagcagaattgcgcagcattatttggccaatgtggaggcatagggtggtccggcaccacatgttgcgttgctggcgcccagtgcagttttgtcaatgactggtactcccagtgccttgcgtcaaccggcggaaaccccccaaacggaacaacttcctctagcttggtttcacggacgtcgtcagcatcctcatccgtcggctcgtcttcacccggcggcaactcaccaactggcagtgcttccacctacacaaccacagatacagctaccgtggctcctcattcgcagtctccttaccccagcattgccgcatccagttgcggatcgtggaccctcgtggataatgtttgctgcccatcatattgtgctaatgatgacacatccgagtcatgctcaggctgcggtacctgcactacgccgccctcggcggactgcaaatccggaaccatgtatccagaggtccatcacgtatccagcaacgagagctggcactacagtagatcaacccactttggcctaacgagcggcggggcctgtggctttggcctgtacggtctctgcacaaagggcagtgttacagccagctggacggatcccatgcttggcgcgacgtgtgacgctttttgtacagcgtatcccctgctttgcaaagaccctaccggcactacccttcgtggcaacttcgcagctccaaacggcgattactacacccaattctggtcctcgttgccaggagccctcgataactacctgtcctgcggcgagtgcattgagctgatacaaacaaagcccgatgggaccgattatgctgtcggagaagccggctacacggatccaattactctcgagattgtggacagctgcccgtgcagcgcgaactccaagtggtgctgtggtccgggcgccgatcattgcggagagatcgacttcaaatacggctgtcctcttcctgctgacagcattcatctcgacctgtcagacattgccatgggccgtttgcagggcaatggatcactaaccaatggcgtcatcccgactcgatatagaagagtccaatgccccaaagttgggaacgcctacatttggcttcgaaatggcggagggccttactattttgctctcacggcagtcaacaccaacggaccgggctcagtcaccaaaatcgagatcaagggcgcagacaccgacaactgggttgccttggtccatgacccaaactatacgagtagccgcccacaagaacgctatggcagttgggtaatcccacagggatcagggccctttaacttgcctgttggaattcgtctgactagcccaacgggggaacagattgtgaatgaacaggccatcaagacattcactcctccggccacaggtgaccccaatttttactacattgacattggtgtgcagtttagccagaatgcgaccgaccccttccagtcgcggtgcaatgaattccagaacaagatcgacatcgccaatgtcaccgtcagatcggtcgcatacgttgctgctggacagaacatctcccaagcggaggtcgcctccgtgtgtaaagcatcggttcaagccagtgtcgacctgtgccgggtaaccatgaacatctcgacgtcggatcgcagccatctgtgggctgaggcctggctcccaagaaattataccggtcgcttcgtgagcacggggaatggaggtctagccggctgtgtccaagaaacggacctcaactttgcagccaactttggtttcgctaccgtgggcaccaacggtggacatgacggggacacggccaaatacttcctcaacaactcggaggttctggccgattttgcctatcgctcagtgcacgaagggaccgtggtgggtaagcaactaactcaattgttttatgacgagggatacaactactcctactatttgggttgctccaccggaggccgccaaggctaccagcaagtccaacggtttcccgacgactatgacggagtgattgcgggctccgcagcgatgaactttatcaacctgatctcctggggggccttcttgtggaaggcgacggggttagcggatgatccagactttatctctgcaaacctgtggtccgtaatccaccaggagattgttcgtcagtgcgacctggtcgatggggctctggatggaatcatcgaagaccctgatttctgtgctccagtcatcgagcgcttgatctgcgacgggactaccaacggcacctcttgtatcacgggagcccaggcagcaaaggtcaaccgggccttgagtgacttctatggccccgacgggacagtgtactacccgcgcctgaactatgggggtgaggccgactcggcttccctgtacttcacggggtcgatgtacagccgtacggaggaatggtacaaatatgtggtctataacgacaccaactggaactccagccagtggacgctggagagtgccaagctggccctggagcagaatccgttcaatatccaggcgtttgatcccaacatcacggccttccgggaccggggtggcaagctgctgtcctaccacggcacgcaggatcccattatcagctccacggatagcaagctctactaccgacgggtagcgaatgccctgaatgccgcgccgtccgagctagatgagttctatcggttcttccagatctccggcatgggccactgtggcgatggcacgggagcatcgtacatcggccagggatatggcacgtacacctccaaggcgccccaagtcaacctgctgcgcacgatggtggactgggtggaaaacggaaaggcgcccgagtatatgccgggcaacaagctcaacgcgaacgggtcaattgagtacatgcgcaagcactgccggtatccgaagcataacattcacacggggccgggtaactacaccgatcctaactcctggacttgcgta

SEQ ID NO: 34 - protein, 979 aa, artificial sequence
  Synthetic Construct
QQNCAALFGQCGGIGWSGTTCCVAGAQCSFVNDWYSQCLASTGGNPPNGTTSSSLVSRTSSASSSVGSSSPGGNSPTGSASTYTTTDTATVAPHSQSPYPSIAASSCGSWTLVDNVCCPSYCANDDTSESCSGCGTCTTPPSADCKSGTMYPEVHHVSSNESWHYSRSTHFGLTSGGACGFGLYGLCTKGSVTASWTDPMLGATCDAFCTAYPLLCKDPTGTTLRGNFAAPNGDYYTQFWSSLPGALDNYLSCGECIELIQTKPDGTDYAVGEAGYTDPITLEIVDSCPCSANSKWCCGPGADHCGEIDFKYGCPLPADSIHLDLSDIAMGRLQGNGSLTNGVIPTRYRRVQCPKVGNAYIWLRNGGGPYYFALTAVNTNGPGSVTKIEIKGADTDNWVALVHDPNYTSSRPQERYGSWVIPQGSGPFNLPVGIRLTSPTGEQIVNEQAIKTFTPPATGDPNFYYIDIGVQFSQNATDPFQSRCNEFQNKIDIANVTVRSVAYVAAGQNISQAEVASVCKASVQASVDLCRVTMNISTSDRSHLWAEAWLPRNYTGRFVSTGNGGLAGCVQETDLNFAANFGFATVGTNGGHDGDTAKYFLNNSEVLADFAYRSVHEGTVVGKQLTQLFYDEGYNYSYYLGCSTGGRQGYQQVQRFPDDYDGVIAGSAAMNFINLISWGAFLWKATGLADDPDFISANLWSVIHQEIVRQCDLVDGALDGIIEDPDFCAPVIERLICDGTTNGTSCITGAQAAKVNRALSDFYGPDGTVYYPRLNYGGEADSASLYFTGSMYSRTEEWYKYVVYNDTNWNSSQWTLESAKLALEQNPFNIQAFDPNITAFRDRGGKLLSYHGTQDPIISSTDSKLYYRRVANALNAAPSELDEFYRFFQISGMGHCGDGTGASYIGQGYGTYTSKAPQVNLLRTMVDWVENGKAPEYMPGNKLNANGSIEYMRKHCRYPKHNIHTGPGNYTDPNSWTCV

SEQ ID NO: 35 - DNA, 3075 bp, artificial sequence
  synthetic fusion protein
  CDS (1)..(3075)
cagcagaattgcgcagcattatttggccaatgtggaggcatagggtggtccggcaccacatgttgcgttgctggcgcccagtgcagttttgtcaatgactggtactcccagtgccttgcgtcaaccggcggaaaccccccaaacggaacaacttcctctagcttggtttcacggacgtcgtcagcatcctcatccgtcggctcgtcttcacccggcggcaactcaccaactggcagtgcttccacctacacaaccacagatacagctaccgtggctcctcattcgcagtctccttaccccagcattgccgcatccagttgcggatcgtggaccctcgtggataatgtttgctgcccatcatattgtgctaatgatgacacatccgagtcatgctcaggctgcggtacctgcactacgccgccctcggcggactgcaaatccggaaccatgtatccagaggtccatcacgtatccagcaacgagagctggcactacagtagatcaacccactttggcctaacgagcggcggggcctgtggctttggcctgtacggtctctgcacaaagggcagtgttacagccagctggacggatcccatgcttggcgcgacgtgtgacgctttttgtacagcgtatcccctgctttgcaaagaccctaccggcactacccttcgtggcaacttcgcagctccaaacggcgattactacacccaattctggtcctcgttgccaggagccctcgataactacctgtcctgcggcgagtgcattgagctgatacaaacaaagcccgatgggaccgattatgctgtcggagaagccggctacacggatccaattactctcgagattgtggacagctgcccgtgcagcgcgaactccaagtggtgctgtggtccgggcgccgatcattgcggagagatcgacttcaaatacggctgtcctcttcctgctgacagcattcatctcgacctgtcagacattgccatgggccgtttgcagggcaatggatcactaaccaatggcgtcatcccgactcgatatagaagagtccaatgccccaaagttgggaacgcctacatttggcttcgaaatggcggagggccttactattttgctctcacggcagtcaacaccaacggaccgggctcagtcaccaaaatcgagatcaagggcgcagacaccgacaactgggttgccttggtccatgacccaaactatacgagtagccgcccacaagaacgctatggcagttgggtaatcccacagggatcagggccctttaacttgcctgttggaattcgtctgactagcccaacgggggaacagattgtgaatgaacaggccatcaagacattcactcctccggccacaggtgaccccaatttttactacattgacattggtgtgcagtttagccagaatggctcgacttactccagtggatcttcttcggggtcggggtctagctccagctcgagttcgactaccactaaggccacttcgacgaccttgaagactacctcgaccaccagcagtggaagcagttcgacatcggcggcggcgaccgaccccttccagtcgcggtgcaatgaattccagaacaagatcgacatcgccaatgtcaccgtcagatcggtcgcatacgttgctgctggacagaacatctcccaagcggaggtcgcctccgtgtgtaaagcatcggttcaagccagtgtcgacctgtgccgggtaaccatgaacatctcgacgtcggatcgcagccatctgtgggctgaggcctggctcccaagaaattataccggtcgcttcgtgagcacggggaatggaggtctagccggctgtgtccaagaaacggacctcaactttgcagccaactttggtttcgctaccgtgggcaccaacggtggacatgacggggacacggccaaatacttcctcaacaactcggaggttctggccgattttgcctatcgctcagtgcacgaagggaccgtggtgggtaagcaactaactcaattgttttatgacgagggatacaactactcctactatttgggttgctccaccggaggccgccaaggctaccagcaagtccaacggtttcccgacgactatgacggagtgattgcgggctccgcagcgatgaactttatcaacctgatctcctggggggccttcttgtggaaggcgacggggttagcggatgatccagactttatctctgcaaacctgtggtccgtaatccaccaggagattgttcgtcagtgcgacctggtcgatggggctctggatggaatcatcgaagaccctgatttctgtgctccagtcatcgagcgcttgatctgcgacgggactaccaacggcacctcttgtatcacgggagcccaggcagcaaaggtcaaccgggccttgagtgacttctatggccccgacgggacagtgtactacccgcgcctgaactatgggggtgaggccgactcggcttccctgtacttcacggggtcgatgtacagccgtacggaggaatggtacaaatatgtggtctataacgacaccaactggaactccagccagtggacgctggagagtgccaagctggccctggagcagaatccgttcaatatccaggcgtttgatcccaacatcacggccttccgggaccggggtggcaagctgctgtcctaccacggcacgcaggatcccattatcagctccacggatagcaagctctactaccgacgggtagcgaatgccctgaatgccgcgccgtccgagctagatgagttctatcggttcttccagatctccggcatgggccactgtggcgatggcacgggagcatcgtacatcggccagggatatggcacgtacacctccaaggcgccccaagtcaacctgctgcgcacgatggtggactgggtggaaaacggaaaggcgcccgagtatatgccgggcaacaagctcaacgcgaacgggtcaattgagtacatgcgcaagcactgccggtatccgaagcataacattcacacggggccgggtaactacaccgatcctaactcctggacttgcgta

SEQ ID NO: 36 - protein, 1025 aa, artificial sequence
  Synthetic Construct
QQNCAALFGQCGGIGWSGTTCCVAGAQCSFVNDWYSQCLASTGGNPPNGTTSSSLVSRTSSASSSVGSSSPGGNSPTGSASTYTTTDTATVAPHSQSPYPSIAASSCGSWTLVDNVCCPSYCANDDTSESCSGCGTCTTPPSADCKSGTMYPEVHHVSSNESWHYSRSTHFGLTSGGACGFGLYGLCTKGSVTASWTDPMLGATCDAFCTAYPLLCKDPTGTTLRGNFAAPNGDYYTQFWSSLPGALDNYLSCGECIELIQTKPDGTDYAVGEAGYTDPITLEIVDSCPCSANSKWCCGPGADHCGEIDFKYGCPLPADSIHLDLSDIAMGRLQGNGSLTNGVIPTRYRRVQCPKVGNAYIWLRNGGGPYYFALTAVNTNGPGSVTKIEIKGADTDNWVALVHDPNYTSSRPQERYGSWVIPQGSGPFNLPVGIRLTSPTGEQIVNEQAIKTFTPPATGDPNFYYIDIGVQFSQNGSTYSSGSSSGSGSSSSSSSTTTKATSTTLKTTSTTSSGSSSTSAAATDPFQSRCNEFQNKIDIANVTVRSVAYVAAGQNISQAEVASVCKASVQASVDLCRVTMNISTSDRSHLWAEAWLPRNYTGRFVSTGNGGLAGCVQETDLNFAANFGFATVGTNGGHDGDTAKYFLNNSEVLADFAYRSVHEGTVVGKQLTQLFYDEGYNYSYYLGCSTGGRQGYQQVQRFPDDYDGVIAGSAAMNFINLISWGAFLWKATGLADDPDFISANLWSVIHQEIVRQCDLVDGALDGIIEDPDFCAPVIERLICDGTTNGTSCITGAQAAKVNRALSDFYGPDGTVYYPRLNYGGEADSASLYFTGSMYSRTEEWYKYVVYNDTNWNSSQWTLESAKLALEQNPFNIQAFDPNITAFRDRGGKLLSYHGTQDPIISSTDSKLYYRRVANALNAAPSELDEFYRFFQISGMGHCGDGTGASYIGQGYGTYTSKAPQVNLLRTMVDWVENGKAPEYMPGNKLNANGSIEYMRKHCRYPKHNIHTGPGNYTDPNSWTCV

SEQ ID NO: 37 - DNA, 1989 bp, artificial sequence
  synthetic fusion protein
  CDS (1)..(1989)
cagcagaattgcgcagcattatttggccaatgtggaggcatagggtggtccggcaccacatgttgcgttgctggcgcccagtgcagttttgtcaatgactggtactcccagtgccttgcgtcaaccggcggaaaccccccaaacggaacaacttcctctagcttggtttcacggacgtcgtcagcatcctcatccgtcggctcgtcttcacccggcggcaactcaccaactggcagtgcttccacctacacaaccacagatacagctaccgtggctcctcattcgcagtctccttaccccagcattgccgcatccagttgcggatcgtggaccctcgtggataatgtttgctgcccatcatattgtgctaatgatgacacatccgagtcatgctcaggctgcggtacctgcactacgccgccctcggcggactgcaaatccggaaccatgtatccagaggtccatcacgtatccagcaacgagagctggcactacagtagatcaacccactttggcctaacgagcggcggggcctgtggctttggcctgtacggtctctgcacaaagggcagtgttacagccagctggacggatcccatgcttggcgcgacgtgtgacgctttttgtacagcgtatcccctgctttgcaaagaccctaccggcactacccttcgtggcaacttcgcagctccaaacggcgattactacacccaattctggtcctcgttgccaggagccctcgataactacctgtcctgcggcgagtgcattgagctgatacaaacaaagcccgatgggaccgattatgctgtcggagaagccggctacacggatccaattactctcgagattgtggacagctgcccgtgcagcgcgaactccaagtggtgctgtggtccgggcgccgatcattgcggagagatcgacttcaaatacggctgtcctcttcctgctgacagcattcatctcgacctgtcagacattgccatgggccgtttgcagggcaatggatcactaaccaatggcgtcatcccgactcgatatagaagagtccaatgccccaaagttgggaacgcctacatttggcttcgaaatggcggagggccttactattttgctctcacggcagtcaacaccaacggaccgggctcagtcaccaaaatcgagatcaagggcgcagacaccgacaactgggttgccttggtccatgacccaaactatacgagtagccgcccacaagaacgctatggcagttgggtaatcccacagggatcagggccctttaacttgcctgttggaattcgtctgactagcccaacgggggaacagattgtgaatgaacaggccatcaagacattcactcctccggccacaggtgaccccaatttttactacattgacattggtgtgcagtttagccagaattcgaccccgagctcgaccggcgagaacaacggcttctactactccttctggaccgacggcggtggagacgtgacctacaccaacggagatgctggtgcctacactgttgagtggtccaacgtgggcaactttgtcggtggaaagggctggaaccccggaagtgcgcaggacatcacctacagcggcaccttcacccctagcggcaacggctacctctccgtctatggctggaccactgaccctctgatcgagtactacatcgtcgagtcttacggcgactacaaccccggcagtggaggcacgtacaagggcaccgtcacctcggacggatccgtttacgatatctacacggctacccgtaccaatgctgcttccattcagggaaccgctaccttcactcagtactggtccgttcgccagaacaagagagttggcggaaccgttaccacctccaaccacttcaatgcttgggctaagctgggaatgaacctgggtactcacaactaccagatcgtggctaccgagggttaccagagcagtggatcttcgtccatcactgttcag

SEQ ID NO: 38 - protein, 663 aa, artificial sequence
  Synthetic Construct
QQNCAALFGQCGGIGWSGTTCCVAGAQCSFVNDWYSQCLASTGGNPPNGTTSSSLVSRTSSASSSVGSSSPGGNSPTGSASTYTTTDTATVAPHSQSPYPSIAASSCGSWTLVDNVCCPSYCANDDTSESCSGCGTCTTPPSADCKSGTMYPEVHHVSSNESWHYSRSTHFGLTSGGACGFGLYGLCTKGSVTASWTDPMLGATCDAFCTAYPLLCKDPTGTTLRGNFAAPNGDYYTQFWSSLPGALDNYLSCGECIELIQTKPDGTDYAVGEAGYTDPITLEIVDSCPCSANSKWCCGPGADHCGEIDFKYGCPLPADSIHLDLSDIAMGRLQGNGSLTNGVIPTRYRRVQCPKVGNAYIWLRNGGGPYYFALTAVNTNGPGSVTKIEIKGADTDNWVALVHDPNYTSSRPQERYGSWVIPQGSGPFNLPVGIRLTSPTGEQIVNEQAIKTFTPPATGDPNFYYIDIGVQFSQNSTPSSTGENNGFYYSFWTDGGGDVTYTNGDAGAYTVEWSNVGNFVGGKGWNPGSAQDITYSGTFTPSGNGYLSVYGWTTDPLIEYYIVESYGDYNPGSGGTYKGTVTSDGSVYDIYTATRTNAASIQGTATFTQYWSVRQNKRVGGTVTTSNHFNAWAKLGMNLGTHNYQIVATEGYQSSGSSSITVQ

SEQ ID NO: 39 - DNA, 2127 bp, artificial sequence
  synthetic fusion protein
  CDS (1)..(2127)
cagcagaattgcgcagcattatttggccaatgtggaggcatagggtggtccggcaccacatgttgcgttgctggcgcccagtgcagttttgtcaatgactggtactcccagtgccttgcgtcaaccggcggaaaccccccaaacggaacaacttcctctagcttggtttcacggacgtcgtcagcatcctcatccgtcggctcgtcttcacccggcggcaactcaccaactggcagtgcttccacctacacaaccacagatacagctaccgtggctcctcattcgcagtctccttaccccagcattgccgcatccagttgcggatcgtggaccctcgtggataatgtttgctgcccatcatattgtgctaatgatgacacatccgagtcatgctcaggctgcggtacctgcactacgccgccctcggcggactgcaaatccggaaccatgtatccagaggtccatcacgtatccagcaacgagagctggcactacagtagatcaacccactttggcctaacgagcggcggggcctgtggctttggcctgtacggtctctgcacaaagggcagtgttacagccagctggacggatcccatgcttggcgcgacgtgtgacgctttttgtacagcgtatcccctgctttgcaaagaccctaccggcactacccttcgtggcaacttcgcagctccaaacggcgattactacacccaattctggtcctcgttgccaggagccctcgataactacctgtcctgcggcgagtgcattgagctgatacaaacaaagcccgatgggaccgattatgctgtcggagaagccggctacacggatccaattactctcgagattgtggacagctgcccgtgcagcgcgaactccaagtggtgctgtggtccgggcgccgatcattgcggagagatcgacttcaaatacggctgtcctcttcctgctgacagcattcatctcgacctgtcagacattgccatgggccgtttgcagggcaatggatcactaaccaatggcgtcatcccgactcgatatagaagagtccaatgccccaaagttgggaacgcctacatttggcttcgaaatggcggagggccttactattttgctctcacggcagtcaacaccaacggaccgggctcagtcaccaaaatcgagatcaagggcgcagacaccgacaactgggttgccttggtccatgacccaaactatacgagtagccgcccacaagaacgctatggcagttgggtaatcccacagggatcagggccctttaacttgcctgttggaattcgtctgactagcccaacgggggaacagattgtgaatgaacaggccatcaagacattcactcctccggccacaggtgaccccaatttttactacattgacattggtgtgcagtttagccagaatggctcgacttactccagtggatcttcttcggggtcggggtctagctccagctcgagttcgactaccactaaggccacttcgacgaccttgaagactacctcgaccaccagcagtggaagcagttcgacatcggcggcgtcgaccccgagctcgaccggcgagaacaacggcttctactactccttctggaccgacggcggtggagacgtgacctacaccaacggagatgctggtgcctacactgttgagtggtccaacgtgggcaactttgtcggtggaaagggctggaaccccggaagtgcgcaggacatcacctacagcggcaccttcacccctagcggcaacggctacctctccgtctatggctggaccactgaccctctgatcgagtactacatcgtcgagtcttacggcgactacaaccccggcagtggaggcacgtacaagggcaccgtcacctcggacggatccgtttacgatatctacacggctacccgtaccaatgctgcttccattcagggaaccgctaccttcactcagtactggtccgttcgccagaacaagagagttggcggaaccgttaccacctccaaccacttcaatgcttgggctaagctgggaatgaacctgggtactcacaactaccagatcgtggctaccgagggttaccagagcagtggatcttcgtccatcactgttcag

SEQ ID NO: 40 - protein, 709 aa, artificial sequence
  Synthetic Construct
QQNCAALFGQCGGIGWSGTTCCVAGAQCSFVNDWYSQCLASTGGNPPNGTTSSSLVSRTSSASSSVGSSSPGGNSPTGSASTYTTTDTATVAPHSQSPYPSIAASSCGSWTLVDNVCCPSYCANDDTSESCSGCGTCTTPPSADCKSGTMYPEVHHVSSNESWHYSRSTHFGLTSGGACGFGLYGLCTKGSVTASWTDPMLGATCDAFCTAYPLLCKDPTGTTLRGNFAAPNGDYYTQFWSSLPGALDNYLSCGECIELIQTKPDGTDYAVGEAGYTDPITLEIVDSCPCSANSKWCCGPGADHCGEIDFKYGCPLPADSIHLDLSDIAMGRLQGNGSLTNGVIPTRYRRVQCPKVGNAYIWLRNGGGPYYFALTAVNTNGPGSVTKIEIKGADTDNWVALVHDPNYTSSRPQERYGSWVIPQGSGPFNLPVGIRLTSPTGEQIVNEQAIKTFTPPATGDPNFYYIDIGVQFSQNGSTYSSGSSSGSGSSSSSSSTTTKATSTTLKTTSTTSSGSSSTSAASTPSSTGENNGFYYSFWTDGGGDVTYTNGDAGAYTVEWSNVGNFVGGKGWNPGSAQDITYSGTFTPSGNGYLSVYGWTTDPLIEYYIVESYGDYNPGSGGTYKGTVTSDGSVYDIYTATRTNAASIQGTATFTQYWSVRQNKRVGGTVTTSNHFNAWAKLGMNLGTHNYQIVATEGYQSSGSSSITVQ

SEQ ID NO: 41 - DNA, 2919 bp, artificial sequence
  synthetic fusion protein
  CDS (1)..(2919)
cagcagaattgcgcagcattatttggccaatgtggaggcatagggtggtccggcaccacatgttgcgttgctggcgcccagtgcagttttgtcaatgactggtactcccagtgccttgcgtcaaccggcggaaaccccccaaacggaacaacttcctctagcttggtttcacggacgtcgtcagcatcctcatccgtcggctcgtcttcacccggcggcaactcaccaactggcagtgcttccacctacacaaccacagatacagctaccgtggctcctcattcgcagtctccttaccccagcattgccgcatccagttgcggatcgtggaccctcgtggataatgtttgctgcccatcatattgtgctaatgatgacacatccgagtcatgctcaggctgcggtacctgcactacgccgccctcggcggactgcaaatccggaaccatgtatccagaggtccatcacgtatccagcaacgagagctggcactacagtagatcaacccactttggcctaacgagcggcggggcctgtggctttggcctgtacggtctctgcacaaagggcagtgttacagccagctggacggatcccatgcttggcgcgacgtgtgacgctttttgtacagcgtatcccctgctttgcaaagaccctaccggcactacccttcgtggcaacttcgcagctccaaacggcgattactacacccaattctggtcctcgttgccaggagccctcgataactacctgtcctgcggcgagtgcattgagctgatacaaacaaagcccgatgggaccgattatgctgtcggagaagccggctacacggatccaattactctcgagattgtggacagctgcccgtgcagcgcgaactccaagtggtgctgtggtccgggcgccgatcattgcggagagatcgacttcaaatacggctgtcctcttcctgctgacagcattcatctcgacctgtcagacattgccatgggccgtttgcagggcaatggatcactaaccaatggcgtcatcccgactcgatatagaagagtccaatgccccaaagttgggaacgcctacatttggcttcgaaatggcggagggccttactattttgctctcacggcagtcaacaccaacggaccgggctcagtcaccaaaatcgagatcaagggcgcagacaccgacaactgggttgccttggtccatgacccaaactatacgagtagccgcccacaagaacgctatggcagttgggtaatcccacagggatcagggccctttaacttgcctgttggaattcgtctgactagcccaacgggggaacagattgtgaatgaacaggccatcaagacattcactcctccggccacaggtgaccccaatttttactacattgacattggtgtgcagtttagccagaatcagtcggcctgcactctccaatcggagactcacccgcctctgacatggcagaaatgctcgtctggtggcacgtgcactcaacagacaggctccgtggtcatcgacgccaactggcgctggactcacgctacgaacagcagcacgaactgctacgatggcaacacttggagctcgaccctatgtcctgacaacgagacctgcgcgaagaactgctgtctggacggtgccgcctacgcgtccacgtacggagttaccacgagcggtaacagcctctccattggctttgtcacccagtctgcgcagaagaacgttggcgctcgcctttaccttatggcgagcgacacgacctaccaggaattcaccctgcttggcaacgagttctctttcgatgttgatgtttcgcagctgccgtgcggcttgaacggagctctctacttcgtgtccatggacgcggatggtggcgtgagcaagtatcccaccaacaccgctggcgccaagtacggcacggggtactgtgacagccagtgtccccgcgatctgaagttcatcaatggccaggccaacgttgagggctgggagccgtcatccaacaacgcgaacacgggcattggaggacacggaagctgctgctctgagatggatatctgggaggccaactccatctccgaggctcttaccccccacccttgcacgactgtcggccaggagatctgcgagggtgatgggtgcggcggaacttactccgataacagatatggcggcacttgcgatcccgatggctgcgactggaacccataccgcctgggcaacaccagcttctacggccctggctcaagctttaccctcgataccaccaagaaattgaccgttgtcacccagttcgagacgtcgggtgccatcaaccgatactatgtccagaatggcgtcactttccagcagcccaacgccgagcttggtagttactctggcaacgagctcaacgatgattactgcacagctgaggaggcagaattcggcggatcctctttctcagacaagggcggcctgactcagttcaagaaggctacctctggcggcatggttctggtcatgagtctgtgggatgattactacgccaacatgctgtggctggactccacctacccgacaaacgagacctcctccacacccggtgccgtgcgcggaagctgctccaccagctccggtgtccctgctcaggtcgaatctcagtctcccaacgccaaggtcaccttctccaacatcaagttcggacccattggcagcaccggcaaccctagcggcggcaaccctcccggcggaaacccgcctggcaccaccaccacccgccgcccagccactaccactggaagctctcccggacctacccagtctcactacggccagtgcggcggtattggctacagcggccccacggtctgcgccagcggcacaacttgccaggtcctgaacccttactactctcagtgcctgtaa

SEQ ID NO: 42 - protein, 972 aa, artificial sequence
  Synthetic Construct
QQNCAALFGQCGGIGWSGTTCCVAGAQCSFVNDWYSQCLASTGGNPPNGTTSSSLVSRTSSASSSVGSSSPGGNSPTGSASTYTTTDTATVAPHSQSPYPSIAASSCGSWTLVDNVCCPSYCANDDTSESCSGCGTCTTPPSADCKSGTMYPEVHHVSSNESWHYSRSTHFGLTSGGACGFGLYGLCTKGSVTASWTDPMLGATCDAFCTAYPLLCKDPTGTTLRGNFAAPNGDYYTQFWSSLPGALDNYLSCGECIELIQTKPDGTDYAVGEAGYTDPITLEIVDSCPCSANSKWCCGPGADHCGEIDFKYGCPLPADSIHLDLSDIAMGRLQGNGSLTNGVIPTRYRRVQCPKVGNAYIWLRNGGGPYYFALTAVNTNGPGSVTKIEIKGADTDNWVALVHDPNYTSSRPQERYGSWVIPQGSGPFNLPVGIRLTSPTGEQIVNEQAIKTFTPPATGDPNFYYIDIGVQFSQNQSACTLQSETHPPLTWQKCSSGGTCTQQTGSVVIDANWRWTHATNSSTNCYDGNTWSSTLCPDNETCAKNCCLDGAAYASTYGVTTSGNSLSIGFVTQSAQKNVGARLYLMASDTTYQEFTLLGNEFSFDVDVSQLPCGLNGALYFVSMDADGGVSKYPTNTAGAKYGTGYCDSQCPRDLKFINGQANVEGWEPSSNNANTGIGGHGSCCSEMDIWEANSISEALTPHPCTTVGQEICEGDGCGGTYSDNRYGGTCDPDGCDWNPYRLGNTSFYGPGSSFTLDTTKKLTVVTQFETSGAINRYYVQNGVTFQQPNAELGSYSGNELNDDYCTAEEAEFGGSSFSDKGGLTQFKKATSGGMVLVMSLWDDYYANMLWLDSTYPTNETSSTPGAVRGSCSTSSGVPAQVESQSPNAKVTFSNIKFGPIGSTGNPSGGNPPGGNPPGTTTTRRPATTTGSSPGPTQSHYGQCGGIGYSGPTVCASGTTCQVLNPYYSQCL

SEQ ID NO: 43 - DNA, 3057 bp, artificial sequence
  synthetic fusion protein
  CDS (1)..(3057)
cagcagaattgcgcagcattatttggccaatgtggaggcatagggtggtccggcaccacatgttgcgttgctggcgcccagtgcagttttgtcaatgactggtactcccagtgccttgcgtcaaccggcggaaaccccccaaacggaacaacttcctctagcttggtttcacggacgtcgtcagcatcctcatccgtcggctcgtcttcacccggcggcaactcaccaactggcagtgcttccacctacacaaccacagatacagctaccgtggctcctcattcgcagtctccttaccccagcattgccgcatccagttgcggatcgtggaccctcgtggataatgtttgctgcccatcatattgtgctaatgatgacacatccgagtcatgctcaggctgcggtacctgcactacgccgccctcggcggactgcaaatccggaaccatgtatccagaggtccatcacgtatccagcaacgagagctggcactacagtagatcaacccactttggcctaacgagcggcggggcctgtggctttggcctgtacggtctctgcacaaagggcagtgttacagccagctggacggatcccatgcttggcgcgacgtgtgacgctttttgtacagcgtatcccctgctttgcaaagaccctaccggcactacccttcgtggcaacttcgcagctccaaacggcgattactacacccaattctggtcctcgttgccaggagccctcgataactacctgtcctgcggcgagtgcattgagctgatacaaacaaagcccgatgggaccgattatgctgtcggagaagccggctacacggatccaattactctcgagattgtggacagctgcccgtgcagcgcgaactccaagtggtgctgtggtccgggcgccgatcattgcggagagatcgacttcaaatacggctgtcctcttcctgctgacagcattcatctcgacctgtcagacattgccatgggccgtttgcagggcaatggatcactaaccaatggcgtcatcccgactcgatatagaagagtccaatgccccaaagttgggaacgcctacatttggcttcgaaatggcggagggccttactattttgctctcacggcagtcaacaccaacggaccgggctcagtcaccaaaatcgagatcaagggcgcagacaccgacaactgggttgccttggtccatgacccaaactatacgagtagccgcccacaagaacgctatggcagttgggtaatcccacagggatcagggccctttaacttgcctgttggaattcgtctgactagcccaacgggggaacagattgtgaatgaacaggccatcaagacattcactcctccggccacaggtgaccccaatttttactacattgacattggtgtgcagtttagccagaatggctcgacttactccagtggatcttcttcggggtcggggtctagctccagctcgagttcgactaccactaaggccacttcgacgaccttgaagactacctcgaccaccagcagtggaagcagttcgacatcggcggcgcagtcggcctgcactctccaatcggagactcacccgcctctgacatggcagaaatgctcgtctggtggcacgtgcactcaacagacaggctccgtggtcatcgacgccaactggcgctggactcacgctacgaacagcagcacgaactgctacgatggcaacacttggagctcgaccctatgtcctgacaacgagacctgcgcgaagaactgctgtctggacggtgccgcctacgcgtccacgtacggagttaccacgagcggtaacagcctctccattggctttgtcacccagtctgcgcagaagaacgttggcgctcgcctttaccttatggcgagcgacacgacctaccaggaattcaccctgcttggcaacgagttctctttcgatgttgatgtttcgcagctgccgtgcggcttgaacggagctctctacttcgtgtccatggacgcggatggtggcgtgagcaagtatcccaccaacaccgctggcgccaagtacggcacggggtactgtgacagccagtgtccccgcgatctgaagttcatcaatggccaggccaacgttgagggctgggagccgtcatccaacaacgcgaacacgggcattggaggacacggaagctgctgctctgagatggatatctgggaggccaactccatctccgaggctcttaccccccacccttgcacgactgtcggccaggagatctgcgagggtgatgggtgcggcggaacttactccgataacagatatggcggcacttgcgatcccgatggctgcgactggaacccataccgcctgggcaacaccagcttctacggccctggctcaagctttaccctcgataccaccaagaaattgaccgttgtcacccagttcgagacgtcgggtgccatcaaccgatactatgtccagaatggcgtcactttccagcagcccaacgccgagcttggtagttactctggcaacgagctcaacgatgattactgcacagctgaggaggcagaattcggcggatcctctttctcagacaagggcggcctgactcagttcaagaaggctacctctggcggcatggttctggtcatgagtctgtgggatgattactacgccaacatgctgtggctggactccacctacccgacaaacgagacctcctccacacccggtgccgtgcgcggaagctgctccaccagctccggtgtccctgctcaggtcgaatctcagtctcccaacgccaaggtcaccttctccaacatcaagttcggacccattggcagcaccggcaaccctagcggcggcaaccctcccggcggaaacccgcctggcaccaccaccacccgccgcccagccactaccactggaagctctcccggacctacccagtctcactacggccagtgcggcggtattggctacagcggccccacggtctgcgccagcggcacaacttgccaggtcctgaacccttactactctcagtgcctgtaa

SEQ ID NO: 44 - protein, 1018 aa, artificial sequence
  Synthetic Construct
QQNCAALFGQCGGIGWSGTTCCVAGAQCSFVNDWYSQCLASTGGNPPNGTTSSSLVSRTSSASSSVGSSSPGGNSPTGSASTYTTTDTATVAPHSQSPYPSIAASSCGSWTLVDNVCCPSYCANDDTSESCSGCGTCTTPPSADCKSGTMYPEVHHVSSNESWHYSRSTHFGLTSGGACGFGLYGLCTKGSVTASWTDPMLGATCDAFCTAYPLLCKDPTGTTLRGNFAAPNGDYYTQFWSSLPGALDNYLSCGECIELIQTKPDGTDYAVGEAGYTDPITLEIVDSCPCSANSKWCCGPGADHCGEIDFKYGCPLPADSIHLDLSDIAMGRLQGNGSLTNGVIPTRYRRVQCPKVGNAYIWLRNGGGPYYFALTAVNTNGPGSVTKIEIKGADTDNWVALVHDPNYTSSRPQERYGSWVIPQGSGPFNLPVGIRLTSPTGEQIVNEQAIKTFTPPATGDPNFYYIDIGVQFSQNGSTYSSGSSSGSGSSSSSSSTTTKATSTTLKTTSTTSSGSSSTSAAQSACTLQSETHPPLTWQKCSSGGTCTQQTGSVVIDANWRWTHATNSSTNCYDGNTWSSTLCPDNETCAKNCCLDGAAYASTYGVTTSGNSLSIGFVTQSAQKNVGARLYLMASDTTYQEFTLLGNEFSFDVDVSQLPCGLNGALYFVSMDADGGVSKYPTNTAGAKYGTGYCDSQCPRDLKFINGQANVEGWEPSSNNANTGIGGHGSCCSEMDIWEANSISEALTPHPCTTVGQEICEGDGCGGTYSDNRYGGTCDPDGCDWNPYRLGNTSFYGPGSSFTLDTTKKLTVVTQFETSGAINRYYVQNGVTFQQPNAELGSYSGNELNDDYCTAEEAEFGGSSFSDKGGLTQFKKATSGGMVLVMSLWDDYYANMLWLDSTYPTNETSSTPGAVRGSCSTSSGVPAQVESQSPNAKVTFSNIKFGPIGSTGNPSGGNPPGGNPPGTTTTRRPATTTGSSPGPTQSHYGQCGGIGYSGPTVCASGTTCQVLNPYYSQCL

SEQ ID NO: 45 - DNA, 2919 bp, artificial sequence; identical to SEQ ID NO: 41
  synthetic fusion protein
  CDS (1)..(2919)

SEQ ID NO: 46 - protein, 972 aa, artificial sequence; identical to SEQ ID NO: 42
  Synthetic Construct

SEQ ID NO: 47 - DNA, 3057 bp, artificial sequence; identical to SEQ ID NO: 43
  synthetic fusion protein
  CDS (1)..(3057)

SEQ ID NO: 48 - protein, 1018 aa, artificial sequence; identical to SEQ ID NO: 44
  Synthetic Construct

SEQ ID NO: 49 - DNA, 2769 bp, artificial sequence
  synthetic fusion protein
  CDS (1)..(2769)
cagcagaattgcgcagcattatttggccaatgtggaggcatagggtggtccggcaccacatgttgcgttgctggcgcccagtgcagttttgtcaatgactggtactcccagtgccttgcgtcaaccggcggaaaccccccaaacggaacaacttcctctagcttggtttcacggacgtcgtcagcatcctcatccgtcggctcgtcttcacccggcggcaactcaccaactggcagtgcttccacctacacaaccacagatacagctaccgtggctcctcattcgcagtctccttaccccagcattgccgcatccagttgcggatcgtggaccctcgtggataatgtttgctgcccatcatattgtgctaatgatgacacatccgagtcatgctcaggctgcggtacctgcactacgccgccctcggcggactgcaaatccggaaccatgtatccagaggtccatcacgtatccagcaacgagagctggcactacagtagatcaacccactttggcctaacgagcggcggggcctgtggctttggcctgtacggtctctgcacaaagggcagtgttacagccagctggacggatcccatgcttggcgcgacgtgtgacgctttttgtacagcgtatcccctgctttgcaaagaccctaccggcactacccttcgtggcaacttcgcagctccaaacggcgattactacacccaattctggtcctcgttgccaggagccctcgataactacctgtcctgcggcgagtgcattgagctgatacaaacaaagcccgatgggaccgattatgctgtcggagaagccggctacacggatccaattactctcgagattgtggacagctgcccgtgcagcgcgaactccaagtggtgctgtggtccgggcgccgatcattgcggagagatcgacttcaaatacggctgtcctcttcctgctgacagcattcatctcgacctgtcagacattgccatgggccgtttgcagggcaatggatcactaaccaatggcgtcatcccgactcgatatagaagagtccaatgccccaaagttgggaacgcctacatttggcttcgaaatggcggagggccttactattttgctctcacggcagtcaacaccaacggaccgggctcagtcaccaaaatcgagatcaagggcgcagacaccgacaactgggttgccttggtccatgacccaaactatacgagtagccgcccacaagaacgctatggcagttgggtaatcccacagggatcagggccctttaacttgcctgttggaattcgtctgactagcccaacgggggaacagattgtgaatgaacaggccatcaagacattcactcctccggccacaggtgaccccaatttttactacattgacattggtgtgcagtttagccagaatcaagcttgctcaagcgtctggggccaatgtggtggccagaattggtcgggtccgacttgctgtgcttccggaagcacatgcgtctactccaacgactattactcccagtgtcttcccggcgctgcaagctcaagctcgtccacgcgcgccgcgtcgacgacttctcgagtatcccccacaacatcccggtcgagctccgcgacgcctccacctggttctactactaccagagtacctccagtcggatcgggaaccgctacgtattcaggcaacccttttgttggggtcactccttgggccaatgcatattacgcctctgaagttagcagcctcgctattcctagcttgactggagccatggccactgctgcagcagctgtcgcaaaggttccctcttttatgtggctagatactcttgacaagacccctctcatggagcaaaccttggccgacatccgcaccgccaacaagaatggcggtaactatgcgggacagtttgtggtgtatgacttgccggatcgcgattgcgctgcccttgcctcgaatggcgaatactctattgccgatggtggcgtcgccaaatataagaactatatcgacaccattcgtcaaattgtcgtggaatattccgatatccggaccctcctggttattgagcctgactctcttgccaacctggtgaccaacctcggtactccaaagtgtgccaatgctcagtcagcctaccttgagtgcatcaactacgccgtcacacagctgaaccttccaaatgttgcgatgtatttggacgctggccatgcaggatggcttggctggccggcaaaccaagacccggccgctcagctatttgcaaatgtttacaagaatgcatcgtctccgagagctcttcgcggattggcaaccaatgtcgccaactacaacgggtggaacattaccagccccccatcgtacacgcaaggcaacgctgtctacaacgagaagctgtacatccacgctattggacgtcttcttgccaatcacggctggtccaacgccttcttcatcactgatcaaggtcgatcgggaaagcagcctaccggacagcaacagtggggagactggtgcaatgtgatcggcaccggatttggtattcgcccatccgcaaacactggggactcgttgctggattcgtttgtctgggtcaagccaggcggcgagtgtgacggcaccagcgacagcagtgcgccacgatttgactcccactgtgcgctcccagatgccttgcaaccggcggctcaagctggtgcttggttccaagcctactttgtgcagcttctcacaaacgcaaacccatcgttcctgtaa

SEQ ID NO: 50 - protein, 922 aa, artificial sequence
  Synthetic Construct
QQNCAALFGQCGGIGWSGTTCCVAGAQCSFVNDWYSQCLASTGGNPPNGTTSSSLVSRTSSASSSVGSSSPGGNSPTGSASTYTTTDTATVAPHSQSPYPSIAASSCGSWTLVDNVCCPSYCANDDTSESCSGCGTCTTPPSADCKSGTMYPEVHHVSSNESWHYSRSTHFGLTSGGACGFGLYGLCTKGSVTASWTDPMLGATCDAFCTAYPLLCKDPTGTTLRGNFAAPNGDYYTQFWSSLPGALDNYLSCGECIELIQTKPDGTDYAVGEAGYTDPITLEIVDSCPCSANSKWCCGPGADHCGEIDFKYGCPLPADSIHLDLSDIAMGRLQGNGSLTNGVIPTRYRRVQCPKVGNAYIWLRNGGGPYYFALTAVNTNGPGSVTKIEIKGADTDNWVALVHDPNYTSSRPQERYGSWVIPQGSGPFNLPVGIRLTSPTGEQIVNEQAIKTFTPPATGDPNFYYIDIGVQFSQNQACSSVWGQCGGQNWSGPTCCASGSTCVYSNDYYSQCLPGAASSSSSTRAASTTSRVSPTTSRSSSATPPPGSTTTRVPPVGSGTATYSGNPFVGVTPWANAYYASEVSSLAIPSLTGAMATAAAAVAKVPSFMWLDTLDKTPLMEQTLADIRTANKNGGNYAGQFVVYDLPDRDCAALASNGEYSIADGGVAKYKNYIDTIRQIVVEYSDIRTLLVIEPDSLANLVTNLGTPKCANAQSAYLECINYAVTQLNLPNVAMYLDAGHAGWLGWPANQDPAAQLFANVYKNASSPRALRGLATNVANYNGWNITSPPSYTQGNAVYNEKLYIHAIGRLLANHGWSNAFFITDQGRSGKQPTGQQQWGDWCNVIGTGFGIRPSANTGDSLLDSFVWVKPGGECDGTSDSSAPRFDSHCALPDALQPAAQAGAWFQAYFVQLLTNANPSFL

SEQ ID NO: 51 - DNA, 2907 bp, artificial sequence
  synthetic fusion protein
  CDS (1)..(2907)
cagcagaattgcgcagcattatttggccaatgtggaggcatagggtggtccggcaccacatgttgcgttgctggcgcccagtgcagttttgtcaatgactggtactcccagtgccttgcgtcaaccggcggaaaccccccaaacggaacaacttcctctagcttggtttcacggacgtcgtcagcatcctcatccgtcggctcgtcttcacccggcggcaactcaccaactggcagtgcttccacctacacaaccacagatacagctaccgtggctcctcattcgcagtctccttaccccagcattgccgcatccagttgcggatcgtggaccctcgtggataatgtttgctgcccatcatattgtgctaatgatgacacatccgagtcatgctcaggctgcggtacctgcactacgccgccctcggcggactgcaaatccggaaccatgtatccagaggtccatcacgtatccagcaacgagagctggcactacagtagatcaacccactttggcctaacgagcggcggggcctgtggctttggcctgtacggtctctgcacaaagggcagtgttacagccagctggacggatcccatgcttggcgcgacgtgtgacgctttttgtacagcgtatcccctgctttgcaaagaccctaccggcactacccttcgtggcaacttcgcagctccaaacggcgattactacacccaattctggtcctcgttgccaggagccctcgataactacctgtcctgcggcgagtgcattgagctgatacaaacaaagcccgatgggaccgattatgctgtcggagaagccggctacacggatccaattactctcgagattgtggacagctgcccgtgcagcgcgaactccaagtggtgctgtggtccgggcgccgatcattgcggagagatcgacttcaaatacggctgtcctcttcctgctgacagcattcatctcgacctgtcagacattgccatgggccgtttgcagggcaatggatcactaaccaatggcgtcatcccgactcgatatagaagagtccaatgccccaaagttgggaacgcctacatttggcttcgaaatggcggagggccttactattttgctctcacggcagtcaacaccaacggaccgggctcagtcaccaaaatcgagatcaagggcgcagacaccgacaactgggttgccttggtccatgacccaaactatacgagtagccgcccacaagaacgctatggcagttgggtaatcccacagggatcagggccctttaacttgcctgttggaattcgtctgactagcccaacgggggaacagattgtgaatgaacaggccatcaagacattcactcctccggccacaggtgaccccaatttttactacattgacattggtgtgcagtttagccagaatggctcgacttactccagtggatcttcttcggggtcggggtctagctccagctcgagttcgactaccactaaggccacttcgacgaccttgaagactacctcgaccaccagcagtggaagcagttcgacatcggcggcgcaagcttgctcaagcgtctggggccaatgtggtggccagaattggtcgggtccgacttgctgtgcttccggaagcacatgcgtctactccaacgactattactcccagtgtcttcccggcgctgcaagctcaagctcgtccacgcgcgccgcgtcgacgacttctcgagtatcccccacaacatcccggtcgagctccgcgacgcctccacctggttctactactaccagagtacctccagtcggatcgggaaccgctacgtattcaggcaacccttttgttggggtcactccttgggccaatgcatattacgcctctgaagttagcagcctcgctattcctagcttgactggagccatggccactgctgcagcagctgtcgcaaaggttccctcttttatgtggctagatactcttgacaagacccctctcatggagcaaaccttggccgacatccgcaccgccaacaagaatggcggtaactatgcgggacagtttgtggtgtatgacttgccggatcgcgattgcgctgcccttgcctcgaatggcgaatactctattgccgatggtggcgtcgccaaatataagaactatatcgacaccattcgtcaaattgtcgtggaatattccgatatccggaccctcctggttattgagcctgactctcttgccaacctggtgaccaacctcggtactccaaagtgtgccaatgctcagtcagcctaccttgagtgcatcaactacgccgtcacacagctgaaccttccaaatgttgcgatgtatttggacgctggccatgcaggatggcttggctggccggcaaaccaagacccggccgctcagctatttgcaaatgtttacaagaatgcatcgtctccgagagctcttcgcggattggcaaccaatgtcgccaactacaacgggtggaacattaccagccccccatcgtacacgcaaggcaacgctgtctacaacgagaagctgtacatccacgctattggacgtcttcttgccaatcacggctggtccaacgccttcttcatcactgatcaaggtcgatcgggaaagcagcctaccggacagcaacagtggggagactggtgcaatgtgatcggcaccggatttggtattcgcccatccgcaaacactggggactcgttgctggattcgtttgtctgggtcaagccaggcggcgagtgtgacggcaccagcgacagcagtgcgccacgatttgactcccactgtgcgctcccagatgccttgcaaccggcggctcaagctggtgcttggttccaagcctactttgtgcagcttctcacaaacgcaaacccatcgttcctgtaa

SEQ ID NO: 52 - protein, 968 aa, artificial sequence
  Synthetic Construct
QQNCAALFGQCGGIGWSGTTCCVAGAQCSFVNDWYSQCLASTGGNPPNGTTSSSLVSRTSSASSSVGSSSPGGNSPTGSASTYTTTDTATVAPHSQSPYPSIAASSCGSWTLVDNVCCPSYCANDDTSESCSGCGTCTTPPSADCKSGTMYPEVHHVSSNESWHYSRSTHFGLTSGGACGFGLYGLCTKGSVTASWTDPMLGATCDAFCTAYPLLCKDPTGTTLRGNFAAPNGDYYTQFWSSLPGALDNYLSCGECIELIQTKPDGTDYAVGEAGYTDPITLEIVDSCPCSANSKWCCGPGADHCGEIDFKYGCPLPADSIHLDLSDIAMGRLQGNGSLTNGVIPTRYRRVQCPKVGNAYIWLRNGGGPYYFALTAVNTNGPGSVTKIEIKGADTDNWVALVHDPNYTSSRPQERYGSWVIPQGSGPFNLPVGIRLTSPTGEQIVNEQAIKTFTPPATGDPNFYYIDIGVQFSQNGSTYSSGSSSGSGSSSSSSSTTTKATSTTLKTTSTTSSGSSSTSAAQACSSVWGQCGGQNWSGPTCCASGSTCVYSNDYYSQCLPGAASSSSSTRAASTTSRVSPTTSRSSSATPPPGSTTTRVPPVGSGTATYSGNPFVGVTPWANAYYASEVSSLAIPSLTGAMATAAAAVAKVPSFMWLDTLDKTPLMEQTLADIRTANKNGGNYAGQFVVYDLPDRDCAALASNGEYSIADGGVAKYKNYIDTIRQIVVEYSDIRTLLVIEPDSLANLVTNLGTPKCANAQSAYLECINYAVTQLNLPNVAMYLDAGHAGWLGWPANQDPAAQLFANVYKNASSPRALRGLATNVANYNGWNITSPPSYTQGNAVYNEKLYIHAIGRLLANHGWSNAFFITDQGRSGKQPTGQQQWGDWCNVIGTGFGIRPSANTGDSLLDSFVWVKPGGECDGTSDSSAPRFDSHCALPDALQPAAQAGAWFQAYFVQLLTNANPSFL

SEQ ID NO: 53 - DNA, 2655 bp, artificial sequence
  synthetic fusion protein
  CDS (1)..(2655)
cagcagaattgcgcagcattatttggccaatgtggaggcatagggtggtccggcaccacatgttgcgttgctggcgcccagtgcagttttgtcaatgactggtactcccagtgccttgcgtcaaccggcggaaaccccccaaacggaacaacttcctctagcttggtttcacggacgtcgtcagcatcctcatccgtcggctcgtcttcacccggcggcaactcaccaactggcagtgcttccacctacacaaccacagatacagctaccgtggctcctcattcgcagtctccttaccccagcattgccgcatccagttgcggatcgtggaccctcgtggataatgtttgctgcccatcatattgtgctaatgatgacacatccgagtcatgctcaggctgcggtacctgcactacgccgccctcggcggactgcaaatccggaaccatgtatccagaggtccatcacgtatccagcaacgagagctggcactacagtagatcaacccactttggcctaacgagcggcggggcctgtggctttggcctgtacggtctctgcacaaagggcagtgttacagccagctggacggatcccatgcttggcgcgacgtgtgacgctttttgtacagcgtatcccctgctttgcaaagaccctaccggcactacccttcgtggcaacttcgcagctccaaacggcgattactacacccaattctggtcctcgttgccaggagccctcgataactacctgtcctgcggcgagtgcattgagctgatacaaacaaagcccgatgggaccgattatgctgtcggagaagccggctacacggatccaattactctcgagattgtggacagctgcccgtgcagcgcgaactccaagtggtgctgtggtccgggcgccgatcattgcggagagatcgacttcaaatacggctgtcctcttcctgctgacagcattcatctcgacctgtcagacattgccatgggccgtttgcagggcaatggatcactaaccaatggcgtcatcccgactcgatatagaagagtccaatgccccaaagttgggaacgcctacatttggcttcgaaatggcggagggccttactattttgctctcacggcagtcaacaccaacggaccgggctcagtcaccaaaatcgagatcaagggcgcagacaccgacaactgggttgccttggtccatgacccaaactatacgagtagccgcccacaagaacgctatggcagttgggtaatcccacagggatcagggccctttaacttgcctgttggaattcgtctgactagcccaacgggggaacagattgtgaatgaacaggccatcaagacattcactcctccggccacaggtgaccccaatttttactacattgacattggtgtgcagtttagccagaatcccggcgctgcaagctcaagctcgtccacgcgcgccgcgtcgacgacttctcgagtatcccccacaacatcccggtcgagctccgcgacgcctccacctggttctactactaccagagtacctccagtcggatcgggaaccgctacgtattcaggcaacccttttgttggggtcactccttgggccaatgcatattacgcctctgaagttagcagcctcgctattcctagcttgactggagccatggccactgctgcagcagctgtcgcaaaggttccctcttttatgtggctagatactcttgacaagacccctctcatggagcaaaccttggccgacatccgcaccgccaacaagaatggcggtaactatgcgggacagtttgtggtgtatgacttgccggatcgcgattgcgctgcccttgcctcgaatggcgaatactctattgccgatggtggcgtcgccaaatataagaactatatcgacaccattcgtcaaattgtcgtggaatattccgatatccggaccctcctggttattgagcctgactctcttgccaacctggtgaccaacctcggtactccaaagtgtgccaatgctcagtcagcctaccttgagtgcatcaactacgccgtcacacagctgaaccttccaaatgttgcgatgtatttggacgctggccatgcaggatggcttggctggccggcaaaccaagacccggccgctcagctatttgcaaatgtttacaagaatgcatcgtctccgagagctcttcgcggattggcaaccaatgtcgccaactacaacgggtggaacattaccagccccccatcgtacacgcaaggcaacgctgtctacaacgagaagctgtacatccacgctattggacgtcttcttgccaatcacggctggtccaacgccttcttcatcactgatcaaggtcgatcgggaaagcagcctaccggacagcaacagtggggagactggtgcaatgtgatcggcaccggatttggtattcgcccatccgcaaacactggggactcgttgctggattcgtttgtctgggtcaagccaggcggcgagtgtgacggcaccagcgacagcagtgcgccacgatttgactcccactgtgcgctcccagatgccttgcaaccggcggctcaagctggtgcttggttccaagcctactttgtgcagcttctcacaaacgcaaacccatcgttcctgtaa

SEQ ID NO: 54 - protein, 884 aa, artificial sequence
  Synthetic Construct
QQNCAALFGQCGGIGWSGTTCCVAGAQCSFVNDWYSQCLASTGGNPPNGTTSSSLVSRTSSASSSVGSSSPGGNSPTGSASTYTTTDTATVAPHSQSPYPSIAASSCGSWTLVDNVCCPSYCANDDTSESCSGCGTCTTPPSADCKSGTMYPEVHHVSSNESWHYSRSTHFGLTSGGACGFGLYGLCTKGSVTASWTDPMLGATCDAFCTAYPLLCKDPTGTTLRGNFAAPNGDYYTQFWSSLPGALDNYLSCGECIELIQTKPDGTDYAVGEAGYTDPITLEIVDSCPCSANSKWCCGPGADHCGEIDFKYGCPLPADSIHLDLSDIAMGRLQGNGSLTNGVIPTRYRRVQCPKVGNAYIWLRNGGGPYYFALTAVNTNGPGSVTKIEIKGADTDNWVALVHDPNYTSSRPQERYGSWVIPQGSGPFNLPVGIRLTSPTGEQIVNEQAIKTFTPPATGDPNFYYIDIGVQFSQNPGAASSSSSTRAASTTSRVSPTTSRSSSATPPPGSTTTRVPPVGSGTATYSGNPFVGVTPWANAYYASEVSSLAIPSLTGAMATAAAAVAKVPSFMWLDTLDKTPLMEQTLADIRTANKNGGNYAGQFVVYDLPDRDCAALASNGEYSIADGGVAKYKNYIDTIRQIVVEYSDIRTLLVIEPDSLANLVTNLGTPKCANAQSAYLECINYAVTQLNLPNVAMYLDAGHAGWLGWPANQDPAAQLFANVYKNASSPRALRGLATNVANYNGWNITSPPSYTQGNAVYNEKLYIHAIGRLLANHGWSNAFFITDQGRSGKQPTGQQQWGDWCNVIGTGFGIRPSANTGDSLLDSFVWVKPGGECDGTSDSSAPRFDSHCALPDALQPAAQAGAWFQAYFVQLLTNANPSFL

SEQ ID NO: 55 - DNA, 2793 bp, artificial sequence
  synthetic fusion protein
  CDS (1)..(2793)
cagcagaattgcgcagcattatttggccaatgtggaggcatagggtggtccggcaccacatgttgcgttgctggcgcccagtgcagttttgtcaatgactggtactcccagtgccttgcgtcaaccggcggaaaccccccaaacggaacaacttcctctagcttggtttcacggacgtcgtcagcatcctcatccgtcggctcgtcttcacccggcggcaactcaccaactggcagtgcttccacctacacaaccacagatacagctaccgtggctcctcattcgcagtctccttaccccagcattgccgcatccagttgcggatcgtggaccctcgtggataatgtttgctgcccatcatattgtgctaatgatgacacatccgagtcatgctcaggctgcggtacctgcactacgccgccctcggcggactgcaaatccggaaccatgtatccagaggtccatcacgtatccagcaacgagagctggcactacagtagatcaacccactttggcctaacgagcggcggggcctgtggctttggcctgtacggtctctgcacaaagggcagtgttacagccagctggacggatcccatgcttggcgcgacgtgtgacgctttttgtacagcgtatcccctgctttgcaaagaccctaccggcactacccttcgtggcaacttcgcagctccaaacggcgattactacacccaattctggtcctcgttgccaggagccctcgataactacctgtcctgcggcgagtgcattgagctgatacaaacaaagcccgatgggaccgattatgctgtcggagaagccggctacacggatccaattactctcgagattgtggacagctgcccgtgcagcgcgaactccaagtggtgctgtggtccgggcgccgatcattgcggagagatcgacttcaaatacggctgtcctcttcctgctgacagcattcatctcgacctgtcagacattgccatgggccgtttgcagggcaatggatcactaaccaatggcgtcatcccgactcgatatagaagagtccaatgccccaaagttgggaacgcctacatttggcttcgaaatggcggagggccttactattttgctctcacggcagtcaacaccaacggaccgggctcagtcaccaaaatcgagatcaagggcgcagacaccgacaactgggttgccttggtccatgacccaaactatacgagtagccgcccacaagaacgctatggcagttgggtaatcccacagggatcagggccctttaacttgcctgttggaattcgtctgactagcccaacgggggaacagattgtgaatgaacaggccatcaagacattcactcctccggccacaggtgaccccaatttttactacattgacattggtgtgcagtttagccagaatggctcgacttactccagtggatcttcttcggggtcggggtctagctccagctcgagttcgactaccactaaggccacttcgacgaccttgaagactacctcgaccaccagcagtggaagcagttcgacatcggcggcgcccggcgctgcaagctcaagctcgtccacgcgcgccgcgtcgacgacttctcgagtatcccccacaacatcccggtcgagctccgcgacgcctccacctggttctactactaccagagtacctccagtcggatcgggaaccgctacgtattcaggcaacccttttgttggggtcactccttgggccaatgcatattacgcctctgaagttagcagcctcgctattcctagcttgactggagccatggccactgctgcagcagctgtcgcaaaggttccctcttttatgtggctagatactcttgacaagacccctctcatggagcaaaccttggccgacatccgcaccgccaacaagaatggcggtaactatgcgggacagtttgtggtgtatgacttgccggatcgcgattgcgctgcccttgcctcgaatggcgaatactctattgccgatggtggcgtcgccaaatataagaactatatcgacaccattcgtcaaattgtcgtggaatattccgatatccggaccctcctggttattgagcctgactctcttgccaacctggtgaccaacctcggtactccaaagtgtgccaatgctcagtcagcctaccttgagtgcatcaactacgccgtcacacagctgaaccttccaaatgttgcgatgtatttggacgctggccatgcaggatggcttggctggccggcaaaccaagacccggccgctcagctatttgcaaatgtttacaagaatgcatcgtctccgagagctcttcgcggattggcaaccaatgtcgccaactacaacgggtggaacattaccagccccccatcgtacacgcaaggcaacgctgtctacaacgagaagctgtacatccacgctattggacgtcttcttgccaatcacggctggtccaacgccttcttcatcactgatcaaggtcgatcgggaaagcagcctaccggacagcaacagtggggagactggtgcaatgtgatcggcaccggatttggtattcgcccatccgcaaacactggggactcgttgctggattcgtttgtctgggtcaagccaggcggcgagtgtgacggcaccagcgacagcagtgcgccacgatttgactcccactgtgcgctcccagatgccttgcaaccggcggctcaagctggtgcttggttccaagcctactttgtgcagcttctcacaaacgcaaacccatcgttcctgtaa

SEQ ID NO: 56 - protein, 930 aa, artificial sequence
  Synthetic Construct
QQNCAALFGQCGGIGWSGTTCCVAGAQCSFVNDWYSQCLASTGGNPPNGTTSSSLVSRTSSASSSVGSSSPGGNSPTGSASTYTTTDTATVAPHSQSPYPSIAASSCGSWTLVDNVCCPSYCANDDTSESCSGCGTCTTPPSADCKSGTMYPEVHHVSSNESWHYSRSTHFGLTSGGACGFGLYGLCTKGSVTASWTDPMLGATCDAFCTAYPLLCKDPTGTTLRGNFAAPNGDYYTQFWSSLPGALDNYLSCGECIELIQTKPDGTDYAVGEAGYTDPITLEIVDSCPCSANSKWCCGPGADHCGEIDFKYGCPLPADSIHLDLSDIAMGRLQGNGSLTNGVIPTRYRRVQCPKVGNAYIWLRNGGGPYYFALTAVNTNGPGSVTKIEIKGADTDNWVALVHDPNYTSSRPQERYGSWVIPQGSGPFNLPVGIRLTSPTGEQIVNEQAIKTFTPPATGDPNFYYIDIGVQFSQNGSTYSSGSSSGSGSSSSSSSTTTKATSTTLKTTSTTSSGSSSTSAAPGAASSSSSTRAASTTSRVSPTTSRSSSATPPPGSTTTRVPPVGSGTATYSGNPFVGVTPWANAYYASEVSSLAIPSLTGAMATAAAAVAKVPSFMWLDTLDKTPLMEQTLADIRTANKNGGNYAGQFVVYDLPDRDCAALASNGEYSIADGGVAKYKNYIDTIRQIVVEYSDIRTLLVIEPDSLANLVTNLGTPKCANAQSAYLECINYAVTQLNLPNVAMYLDAGHAGWLGWPANQDPAAQLFANVYKNASSPRALRGLATNVANYNGWNITSPPSYTQGNAVYNEKLYIHAIGRLLANHGWSNAFFITDQGRSGKQPTGQQQWGDWCNVIGTGFGIRPSANTGDSLLDSFVWVKPGGECDGTSDSSAPRFDSHCALPDALQPAAQAGAWFQAYFVQLLTNANPSFL

SEQ ID NO: 57 - DNA, 2739 bp, artificial sequence
  synthetic fusion protein
  CDS (1)..(2739)
cagcagaattgcgcagcattatttggccaatgtggaggcatagggtggtccggcaccacatgttgcgttgctggcgcccagtgcagttttgtcaatgactggtactcccagtgccttgcgtcaaccggcggaaaccccccaaacggaacaacttcctctagcttggtttcacggacgtcgtcagcatcctcatccgtcggctcgtcttcacccggcggcaactcaccaactggcagtgcttccacctacacaaccacagatacagctaccgtggctcctcattcgcagtctccttaccccagcattgccgcatccagttgcggatcgtggaccctcgtggataatgtttgctgcccatcatattgtgctaatgatgacacatccgagtcatgctcaggctgcggtacctgcactacgccgccctcggcggactgcaaatccggaaccatgtatccagaggtccatcacgtatccagcaacgagagctggcactacagtagatcaacccactttggcctaacgagcggcggggcctgtggctttggcctgtacggtctctgcacaaagggcagtgttacagccagctggacggatcccatgcttggcgcgacgtgtgacgctttttgtacagcgtatcccctgctttgcaaagaccctaccggcactacccttcgtggcaacttcgcagctccaaacggcgattactacacccaattctggtcctcgttgccaggagccctcgataactacctgtcctgcggcgagtgcattgagctgatacaaacaaagcccgatgggaccgattatgctgtcggagaagccggctacacggatccaattactctcgagattgtggacagctgcccgtgcagcgcgaactccaagtggtgctgtggtccgggcgccgatcattgcggagagatcgacttcaaatacggctgtcctcttcctgctgacagcattcatctcgacctgtcagacattgccatgggccgtttgcagggcaatggatcactaaccaatggcgtcatcccgactcgatatagaagagtccaatgccccaaagttgggaacgcctacatttggcttcgaaatggcggagggccttactattttgctctcacggcagtcaacaccaacggaccgggctcagtcaccaaaatcgagatcaagggcgcagacaccgacaactgggttgccttggtccatgacccaaactatacgagtagccgcccacaagaacgctatggcagttgggtaatcccacagggatcagggccctttaacttgcctgttggaattcgtctgactagcccaacgggggaacagattgtgaatgaacaggccatcaagacattcactcctccggccacaggtgaccccaatttttactacattgacattggtgtgcagtttagccagaatcagcaaccgggtaccagcacccccgaggtccatcccaagttgacaacctacaagtgtacaaagtccggggggtgcgtggcccaggacacctcggtggtccttgactggaactaccgctggatgcacgacgcaaactacaactcgtgcaccgtcaacggcggcgtcaacaccacgctctgccctgacgaggcgacctgtggcaagaactgcttcatcgagggcgtcgactacgccgcctcgggcgtcacgacctcgggcagcagcctcaccatgaaccagtacatgcccagcagctctggcggctacagcagcgtctctcctcggctgtatctcctggactctgacggtgagtacgtgatgctgaagctcaacggccaggagctgagcttcgacgtcgacctctctgctctgccgtgtggagagaacggctcgctctacctgtctcagatggacgagaacgggggcgccaaccagtataacacggccggtgccaactacgggagcggctactgcgatgctcagtgccccgtccagacatggaggaacggcaccctcaacactagccaccagggcttctgctgcaacgagatggatatcctggagggcaactcgagggcgaatgccttgacccctcactcttgcacggccacggcctgcgactctgccggttgcggcttcaacccctatggcagcggctacaaaagctactacggccccggagataccgttgacacctccaagaccttcaccatcatcacccagttcaacacggacaacggctcgccctcgggcaaccttgtgagcatcacccgcaagtaccagcaaaacggcgtcgacatccccagcgcccagcccggcggcgacaccatctcgtcctgcccgtccgcctcagcctacggcggcctcgccaccatgggcaaggccctgagcagcggcatggtgctcgtgttcagcatttggaacgacaacagccagtacatgaactggctcgacagcggcaacgccggcccctgcagcagcaccgagggcaacccatccaacatcctggccaacaaccccaacacgcacgtcgtcttctccaacatccgctggggagacattgggtctactacgaactcgactgcgcccccgcccccgcctgcgtccagcacgacgttttcgactacacggaggagctcgacgacttcgagcagcccgagctgcacgcagactcactgggggcagtgcggtggcattgggtacagcgggtgcaagacgtgcacgtcgggcactacgtgccagtatagcaacgactactactcgcaatgcctttag

SEQ ID NO: 58 - protein, 912 aa, artificial sequence
  Synthetic Construct
QQNCAALFGQCGGIGWSGTTCCVAGAQCSFVNDWYSQCLASTGGNPPNGTTSSSLVSRTSSASSSVGSSSPGGNSPTGSASTYTTTDTATVAPHSQSPYPSIAASSCGSWTLVDNVCCPSYCANDDTSESCSGCGTCTTPPSADCKSGTMYPEVHHVSSNESWHYSRSTHFGLTSGGACGFGLYGLCTKGSVTASWTDPMLGATCDAFCTAYPLLCKDPTGTTLRGNFAAPNGDYYTQFWSSLPGALDNYLSCGECIELIQTKPDGTDYAVGEAGYTDPITLEIVDSCPCSANSKWCCGPGADHCGEIDFKYGCPLPADSIHLDLSDIAMGRLQGNGSLTNGVIPTRYRRVQCPKVGNAYIWLRNGGGPYYFALTAVNTNGPGSVTKIEIKGADTDNWVALVHDPNYTSSRPQERYGSWVIPQGSGPFNLPVGIRLTSPTGEQIVNEQAIKTFTPPATGDPNFYYIDIGVQFSQNQQPGTSTPEVHPKLTTYKCTKSGGCVAQDTSVVLDWNYRWMHDANYNSCTVNGGVNTTLCPDEATCGKNCFIEGVDYAASGVTTSGSSLTMNQYMPSSSGGYSSVSPRLYLLDSDGEYVMLKLNGQELSFDVDLSALPCGENGSLYLSQMDENGGANQYNTAGANYGSGYCDAQCPVQTWRNGTLNTSHQGFCCNEMDILEGNSRANALTPHSCTATACDSAGCGFNPYGSGYKSYYGPGDTVDTSKTFTIITQFNTDNGSPSGNLVSITRKYQQNGVDIPSAQPGGDTISSCPSASAYGGLATMGKALSSGMVLVFSIWNDNSQYMNWLDSGNAGPCSSTEGNPSNILANNPNTHVVFSNIRWGDIGSTTNSTAPPPPPASSTTFSTTRRSSTTSSSPSCTQTHWGQCGGIGYSGCKTCTSGTTCQYSNDYYSQCL

SEQ ID NO: 59 - DNA, 2877 bp, artificial sequence
  synthetic fusion protein
  CDS (1)..(2877)
cagcagaattgcgcagcattatttggccaatgtggaggcatagggtggtccggcaccacatgttgcgttgctggcgcccagtgcagttttgtcaatgactggtactcccagtgccttgcgtcaaccggcggaaaccccccaaacggaacaacttcctctagcttggtttcacggacgtcgtcagcatcctcatccgtcggctcgtcttcacccggcggcaactcaccaactggcagtgcttccacctacacaaccacagatacagctaccgtggctcctcattcgcagtctccttaccccagcattgccgcatccagttgcggatcgtggaccctcgtggataatgtttgctgcccatcatattgtgctaatgatgacacatccgagtcatgctcaggctgcggtacctgcactacgccgccctcggcggactgcaaatccggaaccatgtatccagaggtccatcacgtatccagcaacgagagctggcactacagtagatcaacccactttggcctaacgagcggcggggcctgtggctttggcctgtacggtctctgcacaaagggcagtgttacagccagctggacggatcccatgcttggcgcgacgtgtgacgctttttgtacagcgtatcccctgctttgcaaagaccctaccggcactacccttcgtggcaacttcgcagctccaaacggcgattactacacccaattctggtcctcgttgccaggagccctcgataactacctgtcctgcggcgagtgcattgagctgatacaaacaaagcccgatgggaccgattatgctgtcggagaagccggctacacggatccaattactctcgagattgtggacagctgcccgtgcagcgcgaactccaagtggtgctgtggtccgggcgccgatcattgcggagagatcgacttcaaatacggctgtcctcttcctgctgacagcattcatctcgacctgtcagacattgccatgggccgtttgcagggcaatggatcactaaccaatggcgtcatcccgactcgatatagaagagtccaatgccccaaagttgggaacgcctacatttggcttcgaaatggcggagggccttactattttgctctcacggcagtcaacaccaacggaccgggctcagtcaccaaaatcgagatcaagggcgcagacaccgacaactgggttgccttggtccatgacccaaactatacgagtagccgcccacaagaacgctatggcagttgggtaatcccacagggatcagggccctttaacttgcctgttggaattcgtctgactagcccaacgggggaacagattgtgaatgaacaggccatcaagacattcactcctccggccacaggtgaccccaatttttactacattgacattggtgtgcagtttagccagaatggctcgacttactccagtggatcttcttcggggtcggggtctagctccagctcgagttcgactaccactaaggccacttcgacgaccttgaagactacctcgaccaccagcagtggaagcagttcgacatcggcggcgcagcaaccgggtaccagcacccccgaggtccatcccaagttgacaacctacaagtgtacaaagtccggggggtgcgtggcccaggacacctcggtggtccttgactggaactaccgctggatgcacgacgcaaactacaactcgtgcaccgtcaacggcggcgtcaacaccacgctctgccctgacgaggcgacctgtggcaagaactgcttcatcgagggcgtcgactacgccgcctcgggcgtcacgacctcgggcagcagcctcaccatgaaccagtacatgcccagcagctctggcggctacagcagcgtctctcctcggctgtatctcctggactctgacggtgagtacgtgatgctgaagctcaacggccaggagctgagcttcgacgtcgacctctctgctctgccgtgtggagagaacggctcgctctacctgtctcagatggacgagaacgggggcgccaaccagtataacacggccggtgccaactacgggagcggctactgcgatgctcagtgccccgtccagacatggaggaacggcaccctcaacactagccaccagggcttctgctgcaacgagatggatatcctggagggcaactcgagggcgaatgccttgacccctcactcttgcacggccacggcctgcgactctgccggttgcggcttcaacccctatggcagcggctacaaaagctactacggccccggagataccgttgacacctccaagaccttcaccatcatcacccagttcaacacggacaacggctcgccctcgggcaaccttgtgagcatcacccgcaagtaccagcaaaacggcgtcgacatccccagcgcccagcccggcggcgacaccatctcgtcctgcccgtccgcctcagcctacggcggcctcgccaccatgggcaaggccctgagcagcggcatggtgctcgtgttcagcatttggaacgacaacagccagtacatgaactggctcgacagcggcaacgccggcccctgcagcagcaccgagggcaacccatccaacatcctggccaacaaccccaacacgcacgtcgtcttctccaacatccgctggggagacattgggtctactacgaactcgactgcgcccccgcccccgcctgcgtccagcacgacgttttcgactacacggaggagctcgacgacttcgagcagcccgagctgcacgcagactcactgggggcagtgcggtggcattgggtacagcgggtgcaagacgtgcacgtcgggcactacgtgccagtatagcaacgactactactcgcaatgcctttag

SEQ ID NO: 60 - protein, 958 aa, artificial sequence
  Synthetic Construct
QQNCAALFGQCGGIGWSGTTCCVAGAQCSFVNDWYSQCLASTGGNPPNGTTSSSLVSRTSSASSSVGSSSPGGNSPTGSASTYTTTDTATVAPHSQSPYPSIAASSCGSWTLVDNVCCPSYCANDDTSESCSGCGTCTTPPSADCKSGTMYPEVHHVSSNESWHYSRSTHFGLTSGGACGFGLYGLCTKGSVTASWTDPMLGATCDAFCTAYPLLCKDPTGTTLRGNFAAPNGDYYTQFWSSLPGALDNYLSCGECIELIQTKPDGTDYAVGEAGYTDPITLEIVDSCPCSANSKWCCGPGADHCGEIDFKYGCPLPADSIHLDLSDIAMGRLQGNGSLTNGVIPTRYRRVQCPKVGNAYIWLRNGGGPYYFALTAVNTNGPGSVTKIEIKGADTDNWVALVHDPNYTSSRPQERYGSWVIPQGSGPFNLPVGIRLTSPTGEQIVNEQAIKTFTPPATGDPNFYYIDIGVQFSQNGSTYSSGSSSGSGSSSSSSSTTTKATSTTLKTTSTTSSGSSSTSAAQQPGTSTPEVHPKLTTYKCTKSGGCVAQDTSVVLDWNYRWMHDANYNSCTVNGGVNTTLCPDEATCGKNCFIEGVDYAASGVTTSGSSLTMNQYMPSSSGGYSSVSPRLYLLDSDGEYVMLKLNGQELSFDVDLSALPCGENGSLYLSQMDENGGANQYNTAGANYGSGYCDAQCPVQTWRNGTLNTSHQGFCCNEMDILEGNSRANALTPHSCTATACDSAGCGFNPYGSGYKSYYGPGDTVDTSKTFTIITQFNTDNGSPSGNLVSITRKYQQNGVDIPSAQPGGDTISSCPSASAYGGLATMGKALSSGMVLVFSIWNDNSQYMNWLDSGNAGPCSSTEGNPSNILANNPNTHVVFSNIRWGDIGSTTNSTAPPPPPASSTTFSTTRRSSTTSSSPSCTQTHWGQCGGIGYSGCKTCTSGTTCQYSNDYYSQCL

SEQ ID NO: 61 - DNA, 2625 bp, artificial sequence
  synthetic fusion protein
  CDS (1)..(2625)
cagcagaattgcgcagcattatttggccaatgtggaggcatagggtggtccggcaccacatgttgcgttgctggcgcccagtgcagttttgtcaatgactggtactcccagtgccttgcgtcaaccggcggaaaccccccaaacggaacaacttcctctagcttggtttcacggacgtcgtcagcatcctcatccgtcggctcgtcttcacccggcggcaactcaccaactggcagtgcttccacctacacaaccacagatacagctaccgtggctcctcattcgcagtctccttaccccagcattgccgcatccagttgcggatcgtggaccctcgtggataatgtttgctgcccatcatattgtgctaatgatgacacatccgagtcatgctcaggctgcggtacctgcactacgccgccctcggcggactgcaaatccggaaccatgtatccagaggtccatcacgtatccagcaacgagagctggcactacagtagatcaacccactttggcctaacgagcggcggggcctgtggctttggcctgtacggtctctgcacaaagggcagtgttacagccagctggacggatcccatgcttggcgcgacgtgtgacgctttttgtacagcgtatcccctgctttgcaaagaccctaccggcactacccttcgtggcaacttcgcagctccaaacggcgattactacacccaattctggtcctcgttgccaggagccctcgataactacctgtcctgcggcgagtgcattgagctgatacaaacaaagcccgatgggaccgattatgctgtcggagaagccggctacacggatccaattactctcgagattgtggacagctgcccgtgcagcgcgaactccaagtggtgctgtggtccgggcgccgatcattgcggagagatcgacttcaaatacggctgtcctcttcctgctgacagcattcatctcgacctgtcagacattgccatgggccgtttgcagggcaatggatcactaaccaatggcgtcatcccgactcgatatagaagagtccaatgccccaaagttgggaacgcctacatttggcttcgaaatggcggagggccttactattttgctctcacggcagtcaacaccaacggaccgggctcagtcaccaaaatcgagatcaagggcgcagacaccgacaactgggttgccttggtccatgacccaaactatacgagtagccgcccacaagaacgctatggcagttgggtaatcccacagggatcagggccctttaacttgcctgttggaattcgtctgactagcccaacgggggaacagattgtgaatgaacaggccatcaagacattcactcctccggccacaggtgaccccaatttttactacattgacattggtgtgcagtttagccagaatcagcaaccgggtaccagcacccccgaggtccatcccaagttgacaacctacaagtgtacaaagtccggggggtgcgtggcccaggacacctcggtggtccttgactggaactaccgctggatgcacgacgcaaactacaactcgtgcaccgtcaacggcggcgtcaacaccacgctctgccctgacgaggcgacctgtggcaagaactgcttcatcgagggcgtcgactacgccgcctcgggcgtcacgacctcgggcagcagcctcaccatgaaccagtacatgcccagcagctctggcggctacagcagcgtctctcctcggctgtatctcctggactctgacggtgagtacgtgatgctgaagctcaacggccaggagctgagcttcgacgtcgacctctctgctctgccgtgtggagagaacggctcgctctacctgtctcagatggacgagaacgggggcgccaaccagtataacacggccggtgccaactacgggagcggctactgcgatgctcagtgccccgtccagacatggaggaacggcaccctcaacactagccaccagggcttctgctgcaacgagatggatatcctggagggcaactcgagggcgaatgccttgacccctcactcttgcacggccacggcctgcgactctgccggttgcggcttcaacccctatggcagcggctacaaaagctactacggccccggagataccgttgacacctccaagaccttcaccatcatcacccagttcaacacggacaacggctcgccctcgggcaaccttgtgagcatcacccgcaagtaccagcaaaacggcgtcgacatccccagcgcccagcccggcggcgacaccatctcgtcctgcccgtccgcctcagcctacggcggcctcgccaccatgggcaaggccctgagcagcggcatggtgctcgtgttcagcatttggaacgacaacagccagtacatgaactggctcgacagcggcaacgccggcccctgcagcagcaccgagggcaacccatccaacatcctggccaacaaccccaacacgcacgtcgtcttctccaacatccgctggggagacattgggtctactacgaactcgactgcgcccccgcccccgcctgcgtccagcacgacgttttcgactacacggaggagctcgacgacttcgagcagcccgagc

SEQ ID NO: 62 - protein, 875 aa, artificial sequence
  Synthetic Construct
QQNCAALFGQCGGIGWSGTTCCVAGAQCSFVNDWYSQCLASTGGNPPNGTTSSSLVSRTSSASSSVGSSSPGGNSPTGSASTYTTTDTATVAPHSQSPYPSIAASSCGSWTLVDNVCCPSYCANDDTSESCSGCGTCTTPPSADCKSGTMYPEVHHVSSNESWHYSRSTHFGLTSGGACGFGLYGLCTKGSVTASWTDPMLGATCDAFCTAYPLLCKDPTGTTLRGNFAAPNGDYYTQFWSSLPGALDNYLSCGECIELIQTKPDGTDYAVGEAGYTDPITLEIVDSCPCSANSKWCCGPGADHCGEIDFKYGCPLPADSIHLDLSDIAMGRLQGNGSLTNGVIPTRYRRVQCPKVGNAYIWLRNGGGPYYFALTAVNTNGPGSVTKIEIKGADTDNWVALVHDPNYTSSRPQERYGSWVIPQGSGPFNLPVGIRLTSPTGEQIVNEQAIKTFTPPATGDPNFYYIDIGVQFSQNQQPGTSTPEVHPKLTTYKCTKSGGCVAQDTSVVLDWNYRWMHDANYNSCTVNGGVNTTLCPDEATCGKNCFIEGVDYAASGVTTSGSSLTMNQYMPSSSGGYSSVSPRLYLLDSDGEYVMLKLNGQELSFDVDLSALPCGENGSLYLSQMDENGGANQYNTAGANYGSGYCDAQCPVQTWRNGTLNTSHQGFCCNEMDILEGNSRANALTPHSCTATACDSAGCGFNPYGSGYKSYYGPGDTVDTSKTFTIITQFNTDNGSPSGNLVSITRKYQQNGVDIPSAQPGGDTISSCPSASAYGGLATMGKALSSGMVLVFSIWNDNSQYMNWLDSGNAGPCSSTEGNPSNILANNPNTHVVFSNIRWGDIGSTTNSTAPPPPPASSTTFSTTRRSSTTSSSPS

SEQ ID NO: 63 - DNA, 2763 bp, artificial sequence
  synthetic fusion protein
  CDS (1)..(2763)
cagcagaattgcgcagcattatttggccaatgtggaggcatagggtggtccggcaccacatgttgcgttgctggcgcccagtgcagttttgtcaatgactggtactcccagtgccttgcgtcaaccggcggaaaccccccaaacggaacaacttcctctagcttggtttcacggacgtcgtcagcatcctcatccgtcggctcgtcttcacccggcggcaactcaccaactggcagtgcttccacctacacaaccacagatacagctaccgtggctcctcattcgcagtctccttaccccagcattgccgcatccagttgcggatcgtggaccctcgtggataatgtttgctgcccatcatattgtgctaatgatgacacatccgagtcatgctcaggctgcggtacctgcactacgccgccctcggcggactgcaaatccggaaccatgtatccagaggtccatcacgtatccagcaacgagagctggcactacagtagatcaacccactttggcctaacgagcggcggggcctgtggctttggcctgtacggtctctgcacaaagggcagtgttacagccagctggacggatcccatgcttggcgcgacgtgtgacgctttttgtacagcgtatcccctgctttgcaaagaccctaccggcactacccttcgtggcaacttcgcagctccaaacggcgattactacacccaattctggtcctcgttgccaggagccctcgataactacctgtcctgcggcgagtgcattgagctgatacaaacaaagcccgatgggaccgattatgctgtcggagaagccggctacacggatccaattactctcgagattgtggacagctgcccgtgcagcgcgaactccaagtggtgctgtggtccgggcgccgatcattgcggagagatcgacttcaaatacggctgtcctcttcctgctgacagcattcatctcgacctgtcagacattgccatgggccgtttgcagggcaatggatcactaaccaatggcgtcatcccgactcgatatagaagagtccaatgccccaaagttgggaacgcctacatttggcttcgaaatggcggagggccttactattttgctctcacggcagtcaacaccaacggaccgggctcagtcaccaaaatcgagatcaagggcgcagacaccgacaactgggttgccttggtccatgacccaaactatacgagtagccgcccacaagaacgctatggcagttgggtaatcccacagggatcagggccctttaacttgcctgttggaattcgtctgactagcccaacgggggaacagattgtgaatgaacaggccatcaagacattcactcctccggccacaggtgaccccaatttttactacattgacattggtgtgcagtttagccagaatggctcgacttactccagtggatcttcttcggggtcggggtctagctccagctcgagttcgactaccactaaggccacttcgacgaccttgaagactacctcgaccaccagcagtggaagcagttcgacatcggcggcgcagcaaccgggtaccagcacccccgaggtccatcccaagttgacaacctacaagtgtacaaagtccggggggtgcgtggcccaggacacctcggtggtccttgactggaactaccgctggatgcacgacgcaaactacaactcgtgcaccgtcaacggcggcgtcaacaccacgctctgccctgacgaggcgacctgtggcaagaactgcttcatcgagggcgtcgactacgccgcctcgggcgtcacgacctcgggcagcagcctcaccatgaaccagtacatgcccagcagctctggcggctacagcagcgtctctcctcggctgtatctcctggactctgacggtgagtacgtgatgctgaagctcaacggccaggagctgagcttcgacgtcgacctctctgctctgccgtgtggagagaacggctcgctctacctgtctcagatggacgagaacgggggcgccaaccagtataacacggccggtgccaactacgggagcggctactgcgatgctcagtgccccgtccagacatggaggaacggcaccctcaacactagccaccagggcttctgctgcaacgagatggatatcctggagggcaactcgagggcgaatgccttgacccctcactcttgcacggccacggcctgcgactctgccggttgcggcttcaacccctatggcagcggctacaaaagctactacggccccggagataccgttgacacctccaagaccttcaccatcatcacccagttcaacacggacaacggctcgccctcgggcaaccttgtgagcatcacccgcaagtaccagcaaaacggcgtcgacatccccagcgcccagcccggcggcgacaccatctcgtcctgcccgtccgcctcagcctacggcggcctcgccaccatgggcaaggccctgagcagcggcatggtgctcgtgttcagcatttggaacgacaacagccagtacatgaactggctcgacagcggcaacgccggcccctgcagcagcaccgagggcaacccatccaacatcctggccaacaaccccaacacgcacgtcgtcttctccaacatccgctggggagacattgggtctactacgaactcgactgcgcccccgcccccgcctgcgtccagcacgacgttttcgactacacggaggagctcgacgacttcgagcagcccgagc

SEQ ID NO: 64 - protein, 921 aa, artificial sequence
  Synthetic Construct
QQNCAALFGQCGGIGWSGTTCCVAGAQCSFVNDWYSQCLASTGGNPPNGTTSSSLVSRTSSASSSVGSSSPGGNSPTGSASTYTTTDTATVAPHSQSPYPSIAASSCGSWTLVDNVCCPSYCANDDTSESCSGCGTCTTPPSADCKSGTMYPEVHHVSSNESWHYSRSTHFGLTSGGACGFGLYGLCTKGSVTASWTDPMLGATCDAFCTAYPLLCKDPTGTTLRGNFAAPNGDYYTQFWSSLPGALDNYLSCGECIELIQTKPDGTDYAVGEAGYTDPITLEIVDSCPCSANSKWCCGPGADHCGEIDFKYGCPLPADSIHLDLSDIAMGRLQGNGSLTNGVIPTRYRRVQCPKVGNAYIWLRNGGGPYYFALTAVNTNGPGSVTKIEIKGADTDNWVALVHDPNYTSSRPQERYGSWVIPQGSGPFNLPVGIRLTSPTGEQIVNEQAIKTFTPPATGDPNFYYIDIGVQFSQNGSTYSSGSSSGSGSSSSSSSTTTKATSTTLKTTSTTSSGSSSTSAAQQPGTSTPEVHPKLTTYKCTKSGGCVAQDTSVVLDWNYRWMHDANYNSCTVNGGVNTTLCPDEATCGKNCFIEGVDYAASGVTTSGSSLTMNQYMPSSSGGYSSVSPRLYLLDSDGEYVMLKLNGQELSFDVDLSALPCGENGSLYLSQMDENGGANQYNTAGANYGSGYCDAQCPVQTWRNGTLNTSHQGFCCNEMDILEGNSRANALTPHSCTATACDSAGCGFNPYGSGYKSYYGPGDTVDTSKTFTIITQFNTDNGSPSGNLVSITRKYQQNGVDIPSAQPGGDTISSCPSASAYGGLATMGKALSSGMVLVFSIWNDNSQYMNWLDSGNAGPCSSTEGNPSNILANNPNTHVVFSNIRWGDIGSTTNSTAPPPPPASSTTFSTTRRSSTTSSSPS

SEQ ID NO: 65 - DNA, 2229 bp, artificial sequence
  synthetic fusion protein
  CDS (1)..(2229)
cagagcagctgcgtctcggcttggggtcaatgtggcggtatttcttataccgggtctacctgctgtcagagtgggaatacctgcgccgagattaactcgtactactaccagtgcataccagcaacagctgtgagtacttcaactaccacagtgacatctccctctagctctggttcgtcttctgccaacacgtcaggttatacaacgacgactgtcttgcccagtcccacggcaacacagaacccttatcctccggccaatgccagctcatgtggatcgtgggctctcgttgataacgtttgctgcccatactactgtctctcggataatgaatccgagtcctgcacgagcagctgtaccggcggctgcggcagtcctgattcctccatgtgcaagtccgggacgatgtggggagagcaacacaccgtaacttccaacgaggactggcattacagccgctcaacacactttggtctgaccagcggtggcgcctgcgggttcggtctgtacggcctctgcaccaagaacagtgtcaccgcgagctggacagacccaatgctgggctctacctgcgacgccttctgcaccgcgtatccgctcctctgcaaagaccccgctaacgtcactctccgcgggaactttgctgccccgaacggagactactacactcagttctggccttccctggctgcatccggcaatcccgacaactacctctcttgcggggagtgtttcgaggtcatccgcaccaagcccgacgggacagactacgccgtcggcgagagcggatataccgaccccatagtcctcgaggtagtagacagctgtccctgcaatgccaattcaaaatggtgctgtaagcggccccccccccccccctttttttccccgccttccaacggacaaaatctcacaagaccaggcggcagcggcgcagaccactgcggcgaaatcgacttcaagtacggctgtcctctgccggaaggatcccatcacatggacctctccgatattgccatgggccgactccagggaaacggcagtctcgccgacggtgtgattcccatccgctaccggcgtgtcccctgtcccaagccggggaacatctacatctggcttcatgatggggcgggaccgtattattttgcgctgagcgcggtcaataccaacggccccggctccgtaatcagtatcgaagtccaggctggtggctccgggccatgggttgccctcgagcacgatccgaactacaccagtagccggccgcaggagcggtatggctcttgggtcctcccgcagggcaagggacccattactgtgcctgtttcgatgaggctgacggcgcccaatgggcagcaggtggttaaggagggcgccattaccagctataccccgccggcgactgcggtcgagggcttttggtatattgatctgggagtgcagttcaccgcctccacgcaaggcatctccgaagacctctacaatcgcttggtagagatggccactatctcccaagccgcctacgccgacctatgcaatattccatcgactattatcaaaggagagaaaatttacaacgctcaaactgatatcaacggatggatcctccgcgacgacaccagcaaagaaattatcaccgtcttccgtggcactggcagtgacacaaacctacagctcgatactaactacacgctcacgccattcgacactctacctcaatgcaacgattgcgaggtacacggtggatactatattggatggatctcagtccaagaccaagtcgagtcgcttgtcaaacaacaggctagccagtatccggactatgcgcttaccgtgacaggccatagtctgggagcgtcgatggcagcactcactgccgcccagctgtccgcgacatacgacaacgtccgtctgtacacattcggcgaaccgcgcagcggcaaccaggccttcgcgtcgtacatgaacgatgcgttccaggtctcgagcccggagacgacccagtacttccgggtcactcattccaacgacggcatcccaaacttgcccccggcggacgagggttacgcccatggtggtgtagagtactggagcgttgatccttacagcgcccagaacacgtttgtctgtactggggatgaagtacagtgctgtgaggcacagggcggacagggggtgaatgatgcgcatactacttattttgggatgacgagcggagcttgtacttgg

SEQ ID NO: 66 - protein, 743 aa, artificial sequence
  Synthetic Construct
QSSCVSAWGQCGGISYTGSTCCQSGNTCAEINSYYYQCIPATAVSTSTTTVTSPSSSGSSSANTSGYTTTTVLPSPTATQNPYPPANASSCGSWALVDNVCCPYYCLSDNESESCTSSCTGGCGSPDSSMCKSGTMWGEQHTVTSNEDWHYSRSTHFGLTSGGACGFGLYGLCTKNSVTASWTDPMLGSTCDAFCTAYPLLCKDPANVTLRGNFAAPNGDYYTQFWPSLAASGNPDNYLSCGECFEVIRTKPDGTDYAVGESGYTDPIVLEVVDSCPCNANSKWCCKRPPPPPFFSPPSNGQNLTRPGGSGADHCGEIDFKYGCPLPEGSHHMDLSDIAMGRLQGNGSLADGVIPIRYRRVPCPKPGNIYIWLHDGAGPYYFALSAVNTNGPGSVISIEVQAGGSGPWVALEHDPNYTSSRPQERYGSWVLPQGKGPITVPVSMRLTAPNGQQVVKEGAITSYTPPATAVEGFWYIDLGVQFTASTQGISEDLYNRLVEMATISQAAYADLCNIPSTIIKGEKIYNAQTDINGWILRDDTSKEIITVFRGTGSDTNLQLDTNYTLTPFDTLPQCNDCEVHGGYYIGWISVQDQVESLVKQQASQYPDYALTVTGHSLGASMAALTAAQLSATYDNVRLYTFGEPRSGNQAFASYMNDAFQVSSPETTQYFRVTHSNDGIPNLPPADEGYAHGGVEYWSVDPYSAQNTFVCTGDEVQCCEAQGGQGVNDAHTTYFGMTSGACTW

SEQ ID NO: 67 - DNA, 2367 bp, artificial sequence
  synthetic fusion protein
  CDS (1)..(2367)
cagagcagctgcgtctcggcttggggtcaatgtggcggtatttcttataccgggtctacctgctgtcagagtgggaatacctgcgccgagattaactcgtactactaccagtgcataccagcaacagctgtgagtacttcaactaccacagtgacatctccctctagctctggttcgtcttctgccaacacgtcaggttatacaacgacgactgtcttgcccagtcccacggcaacacagaacccttatcctccggccaatgccagctcatgtggatcgtgggctctcgttgataacgtttgctgcccatactactgtctctcggataatgaatccgagtcctgcacgagcagctgtaccggcggctgcggcagtcctgattcctccatgtgcaagtccgggacgatgtggggagagcaacacaccgtaacttccaacgaggactggcattacagccgctcaacacactttggtctgaccagcggtggcgcctgcgggttcggtctgtacggcctctgcaccaagaacagtgtcaccgcgagctggacagacccaatgctgggctctacctgcgacgccttctgcaccgcgtatccgctcctctgcaaagaccccgctaacgtcactctccgcgggaactttgctgccccgaacggagactactacactcagttctggccttccctggctgcatccggcaatcccgacaactacctctcttgcggggagtgtttcgaggtcatccgcaccaagcccgacgggacagactacgccgtcggcgagagcggatataccgaccccatagtcctcgaggtagtagacagctgtccctgcaatgccaattcaaaatggtgctgtaagcggccccccccccccccctttttttccccgccttccaacggacaaaatctcacaagaccaggcggcagcggcgcagaccactgcggcgaaatcgacttcaagtacggctgtcctctgccggaaggatcccatcacatggacctctccgatattgccatgggccgactccagggaaacggcagtctcgccgacggtgtgattcccatccgctaccggcgtgtcccctgtcccaagccggggaacatctacatctggcttcatgatggggcgggaccgtattattttgcgctgagcgcggtcaataccaacggccccggctccgtaatcagtatcgaagtccaggctggtggctccgggccatgggttgccctcgagcacgatccgaactacaccagtagccggccgcaggagcggtatggctcttgggtcctcccgcagggcaagggacccattactgtgcctgtttcgatgaggctgacggcgcccaatgggcagcaggtggttaaggagggcgccattaccagctataccccgccggcgactgcggtcgagggcttttggtatattgatctgggagtgcagttcaccggctcgacttactccagtggatcttcttcggggtcggggtctagctccagctcgagttcgactaccactaaggccacttcgacgaccttgaagactacctcgaccaccagcagtggaagcagttcgacatcggcggcggcctccacgcaaggcatctccgaagacctctacaatcgcttggtagagatggccactatctcccaagccgcctacgccgacctatgcaatattccatcgactattatcaaaggagagaaaatttacaacgctcaaactgatatcaacggatggatcctccgcgacgacaccagcaaagaaattatcaccgtcttccgtggcactggcagtgacacaaacctacagctcgatactaactacacgctcacgccattcgacactctacctcaatgcaacgattgcgaggtacacggtggatactatattggatggatctcagtccaagaccaagtcgagtcgcttgtcaaacaacaggctagccagtatccggactatgcgcttaccgtgacaggccatagtctgggagcgtcgatggcagcactcactgccgcccagctgtccgcgacatacgacaacgtccgtctgtacacattcggcgaaccgcgcagcggcaaccaggccttcgcgtcgtacatgaacgatgcgttccaggtctcgagcccggagacgacccagtacttccgggtcactcattccaacgacggcatcccaaacttgcccccggcggacgagggttacgcccatggtggtgtagagtactggagcgttgatccttacagcgcccagaacacgtttgtctgtactggggatgaagtacagtgctgtgaggcacagggcggacagggggtgaatgatgcgcatactacttattttgggatgacgagcggagcttgtacttgg

SEQ ID NO: 68 - protein, 789 aa, artificial sequence
  Synthetic Construct
QSSCVSAWGQCGGISYTGSTCCQSGNTCAEINSYYYQCIPATAVSTSTTTVTSPSSSGSSSANTSGYTTTTVLPSPTATQNPYPPANASSCGSWALVDNVCCPYYCLSDNESESCTSSCTGGCGSPDSSMCKSGTMWGEQHTVTSNEDWHYSRSTHFGLTSGGACGFGLYGLCTKNSVTASWTDPMLGSTCDAFCTAYPLLCKDPANVTLRGNFAAPNGDYYTQFWPSLAASGNPDNYLSCGECFEVIRTKPDGTDYAVGESGYTDPIVLEVVDSCPCNANSKWCCKRPPPPPFFSPPSNGQNLTRPGGSGADHCGEIDFKYGCPLPEGSHHMDLSDIAMGRLQGNGSLADGVIPIRYRRVPCPKPGNIYIWLHDGAGPYYFALSAVNTNGPGSVISIEVQAGGSGPWVALEHDPNYTSSRPQERYGSWVLPQGKGPITVPVSMRLTAPNGQQVVKEGAITSYTPPATAVEGFWYIDLGVQFTGSTYSSGSSSGSGSSSSSSSTTTKATSTTLKTTSTTSSGSSSTSAAASTQGISEDLYNRLVEMATISQAAYADLCNIPSTIIKGEKIYNAQTDINGWILRDDTSKEIITVFRGTGSDTNLQLDTNYTLTPFDTLPQCNDCEVHGGYYIGWISVQDQVESLVKQQASQYPDYALTVTGHSLGASMAALTAAQLSATYDNVRLYTFGEPRSGNQAFASYMNDAFQVSSPETTQYFRVTHSNDGIPNLPPADEGYAHGGVEYWSVDPYSAQNTFVCTGDEVQCCEAQGGQGVNDAHTTYFGMTSGACTW

SEQ ID NO: 69 - DNA, 2961 bp, artificial sequence
  synthetic fusion protein
  CDS (1)..(2961)
cagagcagctgcgtctcggcttggggtcaatgtggcggtatttcttataccgggtctacctgctgtcagagtgggaatacctgcgccgagattaactcgtactactaccagtgcataccagcaacagctgtgagtacttcaactaccacagtgacatctccctctagctctggttcgtcttctgccaacacgtcaggttatacaacgacgactgtcttgcccagtcccacggcaacacagaacccttatcctccggccaatgccagctcatgtggatcgtgggctctcgttgataacgtttgctgcccatactactgtctctcggataatgaatccgagtcctgcacgagcagctgtaccggcggctgcggcagtcctgattcctccatgtgcaagtccgggacgatgtggggagagcaacacaccgtaacttccaacgaggactggcattacagccgctcaacacactttggtctgaccagcggtggcgcctgcgggttcggtctgtacggcctctgcaccaagaacagtgtcaccgcgagctggacagacccaatgctgggctctacctgcgacgccttctgcaccgcgtatccgctcctctgcaaagaccccgctaacgtcactctccgcgggaactttgctgccccgaacggagactactacactcagttctggccttccctggctgcatccggcaatcccgacaactacctctcttgcggggagtgtttcgaggtcatccgcaccaagcccgacgggacagactacgccgtcggcgagagcggatataccgaccccatagtcctcgaggtagtagacagctgtccctgcaatgccaattcaaaatggtgctgtaagcggccccccccccccccctttttttccccgccttccaacggacaaaatctcacaagaccaggcggcagcggcgcagaccactgcggcgaaatcgacttcaagtacggctgtcctctgccggaaggatcccatcacatggacctctccgatattgccatgggccgactccagggaaacggcagtctcgccgacggtgtgattcccatccgctaccggcgtgtcccctgtcccaagccggggaacatctacatctggcttcatgatggggcgggaccgtattattttgcgctgagcgcggtcaataccaacggccccggctccgtaatcagtatcgaagtccaggctggtggctccgggccatgggttgccctcgagcacgatccgaactacaccagtagccggccgcaggagcggtatggctcttgggtcctcccgcagggcaagggacccattactgtgcctgtttcgatgaggctgacggcgcccaatgggcagcaggtggttaaggagggcgccattaccagctataccccgccggcgactgcggtcgagggcttttggtatattgatctgggagtgcagttcaccgcgaccgaccccttccagtcgcggtgcaatgaattccagaacaagatcgacatcgccaatgtcaccgtcagatcggtcgcatacgttgctgctggacagaacatctcccaagcggaggtcgcctccgtgtgtaaagcatcggttcaagccagtgtcgacctgtgccgggtaaccatgaacatctcgacgtcggatcgcagccatctgtgggctgaggcctggctcccaagaaattataccggtcgcttcgtgagcacggggaatggaggtctagccggctgtgtccaagaaacggacctcaactttgcagccaactttggtttcgctaccgtgggcaccaacggtggacatgacggggacacggccaaatacttcctcaacaactcggaggttctggccgattttgcctatcgctcagtgcacgaagggaccgtggtgggtaagcaactaactcaattgttttatgacgagggatacaactactcctactatttgggttgctccaccggaggccgccaaggctaccagcaagtccaacggtttcccgacgactatgacggagtgattgcgggctccgcagcgatgaactttatcaacctgatctcctggggggccttcttgtggaaggcgacggggttagcggatgatccagactttatctctgcaaacctgtggtccgtaatccaccaggagattgttcgtcagtgcgacctggtcgatggggctctggatggaatcatcgaagaccctgatttctgtgctccagtcatcgagcgcttgatctgcgacgggactaccaacggcacctcttgtatcacgggagcccaggcagcaaaggtcaaccgggccttgagtgacttctatggccccgacgggacagtgtactacccgcgcctgaactatgggggtgaggccgactcggcttccctgtacttcacggggtcgatgtacagccgtacggaggaatggtacaaatatgtggtctataacgacaccaactggaactccagccagtggacgctggagagtgccaagctggccctggagcagaatccgttcaatatccaggcgtttgatcccaacatcacggccttccgggaccggggtggcaagctgctgtcctaccacggcacgcaggatcccattatcagctccacggatagcaagctctactaccgacgggtagcgaatgccctgaatgccgcgccgtccgagctagatgagttctatcggttcttccagatctccggcatgggccactgtggcgatggcacgggagcatcgtacatcggccagggatatggcacgtacacctccaaggcgccccaagtcaacctgctgcgcacgatggtggactgggtggaaaacggaaaggcgcccgagtatatgccgggcaacaagctcaacgcgaacgggtcaattgagtacatgcgcaagcactgccggtatccgaagcataacattcacacggggccgggtaactacaccgatcctaactcctggacttgcgta

SEQ ID NO: 70 - protein, 987 aa, artificial sequence
  Synthetic Construct
QSSCVSAWGQCGGISYTGSTCCQSGNTCAEINSYYYQCIPATAVSTSTTTVTSPSSSGSSSANTSGYTTTTVLPSPTATQNPYPPANASSCGSWALVDNVCCPYYCLSDNESESCTSSCTGGCGSPDSSMCKSGTMWGEQHTVTSNEDWHYSRSTHFGLTSGGACGFGLYGLCTKNSVTASWTDPMLGSTCDAFCTAYPLLCKDPANVTLRGNFAAPNGDYYTQFWPSLAASGNPDNYLSCGECFEVIRTKPDGTDYAVGESGYTDPIVLEVVDSCPCNANSKWCCKRPPPPPFFSPPSNGQNLTRPGGSGADHCGEIDFKYGCPLPEGSHHMDLSDIAMGRLQGNGSLADGVIPIRYRRVPCPKPGNIYIWLHDGAGPYYFALSAVNTNGPGSVISIEVQAGGSGPWVALEHDPNYTSSRPQERYGSWVLPQGKGPITVPVSMRLTAPNGQQVVKEGAITSYTPPATAVEGFWYIDLGVQFTATDPFQSRCNEFQNKIDIANVTVRSVAYVAAGQNISQAEVASVCKASVQASVDLCRVTMNISTSDRSHLWAEAWLPRNYTGRFVSTGNGGLAGCVQETDLNFAANFGFATVGTNGGHDGDTAKYFLNNSEVLADFAYRSVHEGTVVGKQLTQLFYDEGYNYSYYLGCSTGGRQGYQQVQRFPDDYDGVIAGSAAMNFINLISWGAFLWKATGLADDPDFISANLWSVIHQEIVRQCDLVDGALDGIIEDPDFCAPVIERLICDGTTNGTSCITGAQAAKVNRALSDFYGPDGTVYYPRLNYGGEADSASLYFTGSMYSRTEEWYKYVVYNDTNWNSSQWTLESAKLALEQNPFNIQAFDPNITAFRDRGGKLLSYHGTQDPIISSTDSKLYYRRVANALNAAPSELDEFYRFFQISGMGHCGDGTGASYIGQGYGTYTSKAPQVNLLRTMVDWVENGKAPEYMPGNKLNANGSIEYMRKHCRYPKHNIHTGPGNYTDPNSWTCV

SEQ ID NO: 71 - DNA, 3099 bp, artificial sequence
  synthetic fusion protein
  CDS (1)..(3099)
cagagcagctgcgtctcggcttggggtcaatgtggcggtatttcttataccgggtctacctgctgtcagagtgggaatacctgcgccgagattaactcgtactactaccagtgcataccagcaacagctgtgagtacttcaactaccacagtgacatctccctctagctctggttcgtcttctgccaacacgtcaggttatacaacgacgactgtcttgcccagtcccacggcaacacagaacccttatcctccggccaatgccagctcatgtggatcgtgggctctcgttgataacgtttgctgcccatactactgtctctcggataatgaatccgagtcctgcacgagcagctgtaccggcggctgcggcagtcctgattcctccatgtgcaagtccgggacgatgtggggagagcaacacaccgtaacttccaacgaggactggcattacagccgctcaacacactttggtctgaccagcggtggcgcctgcgggttcggtctgtacggcctctgcaccaagaacagtgtcaccgcgagctggacagacccaatgctgggctctacctgcgacgccttctgcaccgcgtatccgctcctctgcaaagaccccgctaacgtcactctccgcgggaactttgctgccccgaacggagactactacactcagttctggccttccctggctgcatccggcaatcccgacaactacctctcttgcggggagtgtttcgaggtcatccgcaccaagcccgacgggacagactacgccgtcggcgagagcggatataccgaccccatagtcctcgaggtagtagacagctgtccctgcaatgccaattcaaaatggtgctgtaagcggccccccccccccccctttttttccccgccttccaacggacaaaatctcacaagaccaggcggcagcggcgcagaccactgcggcgaaatcgacttcaagtacggctgtcctctgccggaaggatcccatcacatggacctctccgatattgccatgggccgactccagggaaacggcagtctcgccgacggtgtgattcccatccgctaccggcgtgtcccctgtcccaagccggggaacatctacatctggcttcatgatggggcgggaccgtattattttgcgctgagcgcggtcaataccaacggccccggctccgtaatcagtatcgaagtccaggctggtggctccgggccatgggttgccctcgagcacgatccgaactacaccagtagccggccgcaggagcggtatggctcttgggtcctcccgcagggcaagggacccattactgtgcctgtttcgatgaggctgacggcgcccaatgggcagcaggtggttaaggagggcgccattaccagctataccccgccggcgactgcggtcgagggcttttggtatattgatctgggagtgcagttcaccggctcgacttactccagtggatcttcttcggggtcggggtctagctccagctcgagttcgactaccactaaggccacttcgacgaccttgaagactacctcgaccaccagcagtggaagcagttcgacatcggcggcggcgaccgaccccttccagtcgcggtgcaatgaattccagaacaagatcgacatcgccaatgtcaccgtcagatcggtcgcatacgttgctgctggacagaacatctcccaagcggaggtcgcctccgtgtgtaaagcatcggttcaagccagtgtcgacctgtgccgggtaaccatgaacatctcgacgtcggatcgcagccatctgtgggctgaggcctggctcccaagaaattataccggtcgcttcgtgagcacggggaatggaggtctagccggctgtgtccaagaaacggacctcaactttgcagccaactttggtttcgctaccgtgggcaccaacggtggacatgacggggacacggccaaatacttcctcaacaactcggaggttctggccgattttgcctatcgctcagtgcacgaagggaccgtggtgggtaagcaactaactcaattgttttatgacgagggatacaactactcctactatttgggttgctccaccggaggccgccaaggctaccagcaagtccaacggtttcccgacgactatgacggagtgattgcgggctccgcagcgatgaactttatcaacctgatctcctggggggccttcttgtggaaggcgacggggttagcggatgatccagactttatctctgcaaacctgtggtccgtaatccaccaggagattgttcgtcagtgcgacctggtcgatggggctctggatggaatcatcgaagaccctgatttctgtgctccagtcatcgagcgcttgatctgcgacgggactaccaacggcacctcttgtatcacgggagcccaggcagcaaaggtcaaccgggccttgagtgacttctatggccccgacgggacagtgtactacccgcgcctgaactatgggggtgaggccgactcggcttccctgtacttcacggggtcgatgtacagccgtacggaggaatggtacaaatatgtggtctataacgacaccaactggaactccagccagtggacgctggagagtgccaagctggccctggagcagaatccgttcaatatccaggcgtttgatcccaacatcacggccttccgggaccggggtggcaagctgctgtcctaccacggcacgcaggatcccattatcagctccacggatagcaagctctactaccgacgggtagcgaatgccctgaatgccgcgccgtccgagctagatgagttctatcggttcttccagatctccggcatgggccactgtggcgatggcacgggagcatcgtacatcggccagggatatggcacgtacacctccaaggcgccccaagtcaacctgctgcgcacgatggtggactgggtggaaaacggaaaggcgcccgagtatatgccgggcaacaagctcaacgcgaacgggtcaattgagtacatgcgcaagcactgccggtatccgaagcataacattcacacggggccgggtaactacaccgatcctaactcctggacttgcgta

SEQ ID NO: 72 - protein, 1033 aa, artificial sequence
  Synthetic Construct
QSSCVSAWGQCGGISYTGSTCCQSGNTCAEINSYYYQCIPATAVSTSTTTVTSPSSSGSSSANTSGYTTTTVLPSPTATQNPYPPANASSCGSWALVDNVCCPYYCLSDNESESCTSSCTGGCGSPDSSMCKSGTMWGEQHTVTSNEDWHYSRSTHFGLTSGGACGFGLYGLCTKNSVTASWTDPMLGSTCDAFCTAYPLLCKDPANVTLRGNFAAPNGDYYTQFWPSLAASGNPDNYLSCGECFEVIRTKPDGTDYAVGESGYTDPIVLEVVDSCPCNANSKWCCKRPPPPPFFSPPSNGQNLTRPGGSGADHCGEIDFKYGCPLPEGSHHMDLSDIAMGRLQGNGSLADGVIPIRYRRVPCPKPGNIYIWLHDGAGPYYFALSAVNTNGPGSVISIEVQAGGSGPWVALEHDPNYTSSRPQERYGSWVLPQGKGPITVPVSMRLTAPNGQQVVKEGAITSYTPPATAVEGFWYIDLGVQFTGSTYSSGSSSGSGSSSSSSSTTTKATSTTLKTTSTTSSGSSSTSAAATDPFQSRCNEFQNKIDIANVTVRSVAYVAAGQNISQAEVASVCKASVQASVDLCRVTMNISTSDRSHLWAEAWLPRNYTGRFVSTGNGGLAGCVQETDLNFAANFGFATVGTNGGHDGDTAKYFLNNSEVLADFAYRSVHEGTVVGKQLTQLFYDEGYNYSYYLGCSTGGRQGYQQVQRFPDDYDGVIAGSAAMNFINLISWGAFLWKATGLADDPDFISANLWSVIHQEIVRQCDLVDGALDGIIEDPDFCAPVIERLICDGTTNGTSCITGAQAAKVNRALSDFYGPDGTVYYPRLNYGGEADSASLYFTGSMYSRTEEWYKYVVYNDTNWNSSQWTLESAKLALEQNPFNIQAFDPNITAFRDRGGKLLSYHGTQDPIISSTDSKLYYRRVANALNAAPSELDEFYRFFQISGMGHCGDGTGASYIGQGYGTYTSKAPQVNLLRTMVDWVENGKAPEYMPGNKLNANGSIEYMRKHCRYPKHNIHTGPGNYTDPNSWTCV

SEQ ID NO: 73 - DNA, 2013 bp, artificial sequence
  synthetic fusion protein
  CDS (1)..(2013)
cagagcagctgcgtctcggcttggggtcaatgtggcggtatttcttataccgggtctacctgctgtcagagtgggaatacctgcgccgagattaactcgtactactaccagtgcataccagcaacagctgtgagtacttcaactaccacagtgacatctccctctagctctggttcgtcttctgccaacacgtcaggttatacaacgacgactgtcttgcccagtcccacggcaacacagaacccttatcctccggccaatgccagctcatgtggatcgtgggctctcgttgataacgtttgctgcccatactactgtctctcggataatgaatccgagtcctgcacgagcagctgtaccggcggctgcggcagtcctgattcctccatgtgcaagtccgggacgatgtggggagagcaacacaccgtaacttccaacgaggactggcattacagccgctcaacacactttggtctgaccagcggtggcgcctgcgggttcggtctgtacggcctctgcaccaagaacagtgtcaccgcgagctggacagacccaatgctgggctctacctgcgacgccttctgcaccgcgtatccgctcctctgcaaagaccccgctaacgtcactctccgcgggaactttgctgccccgaacggagactactacactcagttctggccttccctggctgcatccggcaatcccgacaactacctctcttgcggggagtgtttcgaggtcatccgcaccaagcccgacgggacagactacgccgtcggcgagagcggatataccgaccccatagtcctcgaggtagtagacagctgtccctgcaatgccaattcaaaatggtgctgtaagcggccccccccccccccctttttttccccgccttccaacggacaaaatctcacaagaccaggcggcagcggcgcagaccactgcggcgaaatcgacttcaagtacggctgtcctctgccggaaggatcccatcacatggacctctccgatattgccatgggccgactccagggaaacggcagtctcgccgacggtgtgattcccatccgctaccggcgtgtcccctgtcccaagccggggaacatctacatctggcttcatgatggggcgggaccgtattattttgcgctgagcgcggtcaataccaacggccccggctccgtaatcagtatcgaagtccaggctggtggctccgggccatgggttgccctcgagcacgatccgaactacaccagtagccggccgcaggagcggtatggctcttgggtcctcccgcagggcaagggacccattactgtgcctgtttcgatgaggctgacggcgcccaatgggcagcaggtggttaaggagggcgccattaccagctataccccgccggcgactgcggtcgagggcttttggtatattgatctgggagtgcagttcacctcgaccccgagctcgaccggcgagaacaacggcttctactactccttctggaccgacggcggtggagacgtgacctacaccaacggagatgctggtgcctacactgttgagtggtccaacgtgggcaactttgtcggtggaaagggctggaaccccggaagtgcgcaggacatcacctacagcggcaccttcacccctagcggcaacggctacctctccgtctatggctggaccactgaccctctgatcgagtactacatcgtcgagtcttacggcgactacaaccccggcagtggaggcacgtacaagggcaccgtcacctcggacggatccgtttacgatatctacacggctacccgtaccaatgctgcttccattcagggaaccgctaccttcactcagtactggtccgttcgccagaacaagagagttggcggaaccgttaccacctccaaccacttcaatgcttgggctaagctgggaatgaacctgggtactcacaactaccagatcgtggctaccgagggttaccagagcagtggatcttcgtccatcactgttcag

SEQ ID NO: 74 - protein, 671 aa, artificial sequence
  Synthetic Construct
QSSCVSAWGQCGGISYTGSTCCQSGNTCAEINSYYYQCIPATAVSTSTTTVTSPSSSGSSSANTSGYTTTTVLPSPTATQNPYPPANASSCGSWALVDNVCCPYYCLSDNESESCTSSCTGGCGSPDSSMCKSGTMWGEQHTVTSNEDWHYSRSTHFGLTSGGACGFGLYGLCTKNSVTASWTDPMLGSTCDAFCTAYPLLCKDPANVTLRGNFAAPNGDYYTQFWPSLAASGNPDNYLSCGECFEVIRTKPDGTDYAVGESGYTDPIVLEVVDSCPCNANSKWCCKRPPPPPFFSPPSNGQNLTRPGGSGADHCGEIDFKYGCPLPEGSHHMDLSDIAMGRLQGNGSLADGVIPIRYRRVPCPKPGNIYIWLHDGAGPYYFALSAVNTNGPGSVISIEVQAGGSGPWVALEHDPNYTSSRPQERYGSWVLPQGKGPITVPVSMRLTAPNGQQVVKEGAITSYTPPATAVEGFWYIDLGVQFTSTPSSTGENNGFYYSFWTDGGGDVTYTNGDAGAYTVEWSNVGNFVGGKGWNPGSAQDITYSGTFTPSGNGYLSVYGWTTDPLIEYYIVESYGDYNPGSGGTYKGTVTSDGSVYDIYTATRTNAASIQGTATFTQYWSVRQNKRVGGTVTTSNHFNAWAKLGMNLGTHNYQIVATEGYQSSGSSSITVQ

SEQ ID NO: 75 - DNA, 2151 bp, artificial sequence
  synthetic fusion protein
  CDS (1)..(2151)
cagagcagctgcgtctcggcttggggtcaatgtggcggtatttcttataccgggtctacctgctgtcagagtgggaatacctgcgccgagattaactcgtactactaccagtgcataccagcaacagctgtgagtacttcaactaccacagtgacatctccctctagctctggttcgtcttctgccaacacgtcaggttatacaacgacgactgtcttgcccagtcccacggcaacacagaacccttatcctccggccaatgccagctcatgtggatcgtgggctctcgttgataacgtttgctgcccatactactgtctctcggataatgaatccgagtcctgcacgagcagctgtaccggcggctgcggcagtcctgattcctccatgtgcaagtccgggacgatgtggggagagcaacacaccgtaacttccaacgaggactggcattacagccgctcaacacactttggtctgaccagcggtggcgcctgcgggttcggtctgtacggcctctgcaccaagaacagtgtcaccgcgagctggacagacccaatgctgggctctacctgcgacgccttctgcaccgcgtatccgctcctctgcaaagaccccgctaacgtcactctccgcgggaactttgctgccccgaacggagactactacactcagttctggccttccctggctgcatccggcaatcccgacaactacctctcttgcggggagtgtttcgaggtcatccgcaccaagcccgacgggacagactacgccgtcggcgagagcggatataccgaccccatagtcctcgaggtagtagacagctgtccctgcaatgccaattcaaaatggtgctgtaagcggccccccccccccccctttttttccccgccttccaacggacaaaatctcacaagaccaggcggcagcggcgcagaccactgcggcgaaatcgacttcaagtacggctgtcctctgccggaaggatcccatcacatggacctctccgatattgccatgggccgactccagggaaacggcagtctcgccgacggtgtgattcccatccgctaccggcgtgtcccctgtcccaagccggggaacatctacatctggcttcatgatggggcgggaccgtattattttgcgctgagcgcggtcaataccaacggccccggctccgtaatcagtatcgaagtccaggctggtggctccgggccatgggttgccctcgagcacgatccgaactacaccagtagccggccgcaggagcggtatggctcttgggtcctcccgcagggcaagggacccattactgtgcctgtttcgatgaggctgacggcgcccaatgggcagcaggtggttaaggagggcgccattaccagctataccccgccggcgactgcggtcgagggcttttggtatattgatctgggagtgcagttcaccggctcgacttactccagtggatcttcttcggggtcggggtctagctccagctcgagttcgactaccactaaggccacttcgacgaccttgaagactacctcgaccaccagcagtggaagcagttcgacatcggcggcgtcgaccccgagctcgaccggcgagaacaacggcttctactactccttctggaccgacggcggtggagacgtgacctacaccaacggagatgctggtgcctacactgttgagtggtccaacgtgggcaactttgtcggtggaaagggctggaaccccggaagtgcgcaggacatcacctacagcggcaccttcacccctagcggcaacggctacctctccgtctatggctggaccactgaccctctgatcgagtactacatcgtcgagtcttacggcgactacaaccccggcagtggaggcacgtacaagggcaccgtcacctcggacggatccgtttacgatatctacacggctacccgtaccaatgctgcttccattcagggaaccgctaccttcactcagtactggtccgttcgccagaacaagagagttggcggaaccgttaccacctccaaccacttcaatgcttgggctaagctgggaatgaacctgggtactcacaactaccagatcgtggctaccgagggttaccagagcagtggatcttcgtccatcactgttcag

SEQ ID NO: 76 - protein, 717 aa, artificial sequence
  Synthetic Construct
QSSCVSAWGQCGGISYTGSTCCQSGNTCAEINSYYYQCIPATAVSTSTTTVTSPSSSGSSSANTSGYTTTTVLPSPTATQNPYPPANASSCGSWALVDNVCCPYYCLSDNESESCTSSCTGGCGSPDSSMCKSGTMWGEQHTVTSNEDWHYSRSTHFGLTSGGACGFGLYGLCTKNSVTASWTDPMLGSTCDAFCTAYPLLCKDPANVTLRGNFAAPNGDYYTQFWPSLAASGNPDNYLSCGECFEVIRTKPDGTDYAVGESGYTDPIVLEVVDSCPCNANSKWCCKRPPPPPFFSPPSNGQNLTRPGGSGADHCGEIDFKYGCPLPEGSHHMDLSDIAMGRLQGNGSLADGVIPIRYRRVPCPKPGNIYIWLHDGAGPYYFALSAVNTNGPGSVISIEVQAGGSGPWVALEHDPNYTSSRPQERYGSWVLPQGKGPITVPVSMRLTAPNGQQVVKEGAITSYTPPATAVEGFWYIDLGVQFTGSTYSSGSSSGSGSSSSSSSTTTKATSTTLKTTSTTSSGSSSTSAASTPSSTGENNGFYYSFWTDGGGDVTYTNGDAGAYTVEWSNVGNFVGGKGWNPGSAQDITYSGTFTPSGNGYLSVYGWTTDPLIEYYIVESYGDYNPGSGGTYKGTVTSDGSVYDIYTATRTNAASIQGTATFTQYWSVRQNKRVGGTVTTSNHFNAWAKLGMNLGTHNYQIVATEGYQSSGSSSITVQ

SEQ ID NO: 77 - DNA, 2943 bp, artificial sequence
  synthetic fusion protein
  CDS (1)..(2943)
cagagcagctgcgtctcggcttggggtcaatgtggcggtatttcttataccgggtctacctgctgtcagagtgggaatacctgcgccgagattaactcgtactactaccagtgcataccagcaacagctgtgagtacttcaactaccacagtgacatctccctctagctctggttcgtcttctgccaacacgtcaggttatacaacgacgactgtcttgcccagtcccacggcaacacagaacccttatcctccggccaatgccagctcatgtggatcgtgggctctcgttgataacgtttgctgcccatactactgtctctcggataatgaatccgagtcctgcacgagcagctgtaccggcggctgcggcagtcctgattcctccatgtgcaagtccgggacgatgtggggagagcaacacaccgtaacttccaacgaggactggcattacagccgctcaacacactttggtctgaccagcggtggcgcctgcgggttcggtctgtacggcctctgcaccaagaacagtgtcaccgcgagctggacagacccaatgctgggctctacctgcgacgccttctgcaccgcgtatccgctcctctgcaaagaccccgctaacgtcactctccgcgggaactttgctgccccgaacggagactactacactcagttctggccttccctggctgcatccggcaatcccgacaactacctctcttgcggggagtgtttcgaggtcatccgcaccaagcccgacgggacagactacgccgtcggcgagagcggatataccgaccccatagtcctcgaggtagtagacagctgtccctgcaatgccaattcaaaatggtgctgtaagcggccccccccccccccctttttttccccgccttccaacggacaaaatctcacaagaccaggcggcagcggcgcagaccactgcggcgaaatcgacttcaagtacggctgtcctctgccggaaggatcccatcacatggacctctccgatattgccatgggccgactccagggaaacggcagtctcgccgacggtgtgattcccatccgctaccggcgtgtcccctgtcccaagccggggaacatctacatctggcttcatgatggggcgggaccgtattattttgcgctgagcgcggtcaataccaacggccccggctccgtaatcagtatcgaagtccaggctggtggctccgggccatgggttgccctcgagcacgatccgaactacaccagtagccggccgcaggagcggtatggctcttgggtcctcccgcagggcaagggacccattactgtgcctgtttcgatgaggctgacggcgcccaatgggcagcaggtggttaaggagggcgccattaccagctataccccgccggcgactgcggtcgagggcttttggtatattgatctgggagtgcagttcacccagtcggcctgcactctccaatcggagactcacccgcctctgacatggcagaaatgctcgtctggtggcacgtgcactcaacagacaggctccgtggtcatcgacgccaactggcgctggactcacgctacgaacagcagcacgaactgctacgatggcaacacttggagctcgaccctatgtcctgacaacgagacctgcgcgaagaactgctgtctggacggtgccgcctacgcgtccacgtacggagttaccacgagcggtaacagcctctccattggctttgtcacccagtctgcgcagaagaacgttggcgctcgcctttaccttatggcgagcgacacgacctaccaggaattcaccctgcttggcaacgagttctctttcgatgttgatgtttcgcagctgccgtgcggcttgaacggagctctctacttcgtgtccatggacgcggatggtggcgtgagcaagtatcccaccaacaccgctggcgccaagtacggcacggggtactgtgacagccagtgtccccgcgatctgaagttcatcaatggccaggccaacgttgagggctgggagccgtcatccaacaacgcgaacacgggcattggaggacacggaagctgctgctctgagatggatatctgggaggccaactccatctccgaggctcttaccccccacccttgcacgactgtcggccaggagatctgcgagggtgatgggtgcggcggaacttactccgataacagatatggcggcacttgcgatcccgatggctgcgactggaacccataccgcctgggcaacaccagcttctacggccctggctcaagctttaccctcgataccaccaagaaattgaccgttgtcacccagttcgagacgtcgggtgccatcaaccgatactatgtccagaatggcgtcactttccagcagcccaacgccgagcttggtagttactctggcaacgagctcaacgatgattactgcacagctgaggaggcagaattcggcggatcctctttctcagacaagggcggcctgactcagttcaagaaggctacctctggcggcatggttctggtcatgagtctgtgggatgattactacgccaacatgctgtggctggactccacctacccgacaaacgagacctcctccacacccggtgccgtgcgcggaagctgctccaccagctccggtgtccctgctcaggtcgaatctcagtctcccaacgccaaggtcaccttctccaacatcaagttcggacccattggcagcaccggcaaccctagcggcggcaaccctcccggcggaaacccgcctggcaccaccaccacccgccgcccagccactaccactggaagctctcccggacctacccagtctcactacggccagtgcggcggtattggctacagcggccccacggtctgcgccagcggcacaacttgccaggtcctgaacccttactactctcagtgcctgtaa

SEQ ID NO: 78 - protein, 980 aa, artificial sequence
  Synthetic Construct
QSSCVSAWGQCGGISYTGSTCCQSGNTCAEINSYYYQCIPATAVSTSTTTVTSPSSSGSSSANTSGYTTTTVLPSPTATQNPYPPANASSCGSWALVDNVCCPYYCLSDNESESCTSSCTGGCGSPDSSMCKSGTMWGEQHTVTSNEDWHYSRSTHFGLTSGGACGFGLYGLCTKNSVTASWTDPMLGSTCDAFCTAYPLLCKDPANVTLRGNFAAPNGDYYTQFWPSLAASGNPDNYLSCGECFEVIRTKPDGTDYAVGESGYTDPIVLEVVDSCPCNANSKWCCKRPPPPPFFSPPSNGQNLTRPGGSGADHCGEIDFKYGCPLPEGSHHMDLSDIAMGRLQGNGSLADGVIPIRYRRVPCPKPGNIYIWLHDGAGPYYFALSAVNTNGPGSVISIEVQAGGSGPWVALEHDPNYTSSRPQERYGSWVLPQGKGPITVPVSMRLTAPNGQQVVKEGAITSYTPPATAVEGFWYIDLGVQFTQSACTLQSETHPPLTWQKCSSGGTCTQQTGSVVIDANWRWTHATNSSTNCYDGNTWSSTLCPDNETCAKNCCLDGAAYASTYGVTTSGNSLSIGFVTQSAQKNVGARLYLMASDTTYQEFTLLGNEFSFDVDVSQLPCGLNGALYFVSMDADGGVSKYPTNTAGAKYGTGYCDSQCPRDLKFINGQANVEGWEPSSNNANTGIGGHGSCCSEMDIWEANSISEALTPHPCTTVGQEICEGDGCGGTYSDNRYGGTCDPDGCDWNPYRLGNTSFYGPGSSFTLDTTKKLTVVTQFETSGAINRYYVQNGVTFQQPNAELGSYSGNELNDDYCTAEEAEFGGSSFSDKGGLTQFKKATSGGMVLVMSLWDDYYANMLWLDSTYPTNETSSTPGAVRGSCSTSSGVPAQVESQSPNAKVTFSNIKFGPIGSTGNPSGGNPPGGNPPGTTTTRRPATTTGSSPGPTQSHYGQCGGIGYSGPTVCASGTTCQVLNPYYSQCL

SEQ ID NO: 79 - DNA, 3081 bp, artificial sequence
  synthetic fusion protein
  CDS (1)..(3081)
cagagcagctgcgtctcggcttggggtcaatgtggcggtatttcttataccgggtctacctgctgtcagagtgggaatacctgcgccgagattaactcgtactactaccagtgcataccagcaacagctgtgagtacttcaactaccacagtgacatctccctctagctctggttcgtcttctgccaacacgtcaggttatacaacgacgactgtcttgcccagtcccacggcaacacagaacccttatcctccggccaatgccagctcatgtggatcgtgggctctcgttgataacgtttgctgcccatactactgtctctcggataatgaatccgagtcctgcacgagcagctgtaccggcggctgcggcagtcctgattcctccatgtgcaagtccgggacgatgtggggagagcaacacaccgtaacttccaacgaggactggcattacagccgctcaacacactttggtctgaccagcggtggcgcctgcgggttcggtctgtacggcctctgcaccaagaacagtgtcaccgcgagctggacagacccaatgctgggctctacctgcgacgccttctgcaccgcgtatccgctcctctgcaaagaccccgctaacgtcactctccgcgggaactttgctgccccgaacggagactactacactcagttctggccttccctggctgcatccggcaatcccgacaactacctctcttgcggggagtgtttcgaggtcatccgcaccaagcccgacgggacagactacgccgtcggcgagagcggatataccgaccccatagtcctcgaggtagtagacagctgtccctgcaatgccaattcaaaatggtgctgtaagcggccccccccccccccctttttttccccgccttccaacggacaaaatctcacaagaccaggcggcagcggcgcagaccactgcggcgaaatcgacttcaagtacggctgtcctctgccggaaggatcccatcacatggacctctccgatattgccatgggccgactccagggaaacggcagtctcgccgacggtgtgattcccatccgctaccggcgtgtcccctgtcccaagccggggaacatctacatctggcttcatgatggggcgggaccgtattattttgcgctgagcgcggtcaataccaacggccccggctccgtaatcagtatcgaagtccaggctggtggctccgggccatgggttgccctcgagcacgatccgaactacaccagtagccggccgcaggagcggtatggctcttgggtcctcccgcagggcaagggacccattactgtgcctgtttcgatgaggctgacggcgcccaatgggcagcaggtggttaaggagggcgccattaccagctataccccgccggcgactgcggtcgagggcttttggtatattgatctgggagtgcagttcaccggctcgacttactccagtggatcttcttcggggtcggggtctagctccagctcgagttcgactaccactaaggccacttcgacgaccttgaagactacctcgaccaccagcagtggaagcagttcgacatcggcggcgcagtcggcctgcactctccaatcggagactcacccgcctctgacatggcagaaatgctcgtctggtggcacgtgcactcaacagacaggctccgtggtcatcgacgccaactggcgctggactcacgctacgaacagcagcacgaactgctacgatggcaacacttggagctcgaccctatgtcctgacaacgagacctgcgcgaagaactgctgtctggacggtgccgcctacgcgtccacgtacggagttaccacgagcggtaacagcctctccattggctttgtcacccagtctgcgcagaagaacgttggcgctcgcctttaccttatggcgagcgacacgacctaccaggaattcaccctgcttggcaacgagttctctttcgatgttgatgtttcgcagctgccgtgcggcttgaacggagctctctacttcgtgtccatggacgcggatggtggcgtgagcaagtatcccaccaacaccgctggcgccaagtacggcacggggtactgtgacagccagtgtccccgcgatctgaagttcatcaatggccaggccaacgttgagggctgggagccgtcatccaacaacgcgaacacgggcattggaggacacggaagctgctgctctgagatggatatctgggaggccaactccatctccgaggctcttaccccccacccttgcacgactgtcggccaggagatctgcgagggtgatgggtgcggcggaacttactccgataacagatatggcggcacttgcgatcccgatggctgcgactggaacccataccgcctgggcaacaccagcttctacggccctggctcaagctttaccctcgataccaccaagaaattgaccgttgtcacccagttcgagacgtcgggtgccatcaaccgatactatgtccagaatggcgtcactttccagcagcccaacgccgagcttggtagttactctggcaacgagctcaacgatgattactgcacagctgaggaggcagaattcggcggatcctctttctcagacaagggcggcctgactcagttcaagaaggctacctctggcggcatggttctggtcatgagtctgtgggatgattactacgccaacatgctgtggctggactccacctacccgacaaacgagacctcctccacacccggtgccgtgcgcggaagctgctccaccagctccggtgtccctgctcaggtcgaatctcagtctcccaacgccaaggtcaccttctccaacatcaagttcggacccattggcagcaccggcaaccctagcggcggcaaccctcccggcggaaacccgcctggcaccaccaccacccgccgcccagccactaccactggaagctctcccggacctacccagtctcactacggccagtgcggcggtattggctacagcggccccacggtctgcgccagcggcacaacttgccaggtcctgaacccttactactctcagtgcctgtaa

SEQ ID NO: 80 - protein, 1026 aa, artificial sequence
  Synthetic Construct
QSSCVSAWGQCGGISYTGSTCCQSGNTCAEINSYYYQCIPATAVSTSTTTVTSPSSSGSSSANTSGYTTTTVLPSPTATQNPYPPANASSCGSWALVDNVCCPYYCLSDNESESCTSSCTGGCGSPDSSMCKSGTMWGEQHTVTSNEDWHYSRSTHFGLTSGGACGFGLYGLCTKNSVTASWTDPMLGSTCDAFCTAYPLLCKDPANVTLRGNFAAPNGDYYTQFWPSLAASGNPDNYLSCGECFEVIRTKPDGTDYAVGESGYTDPIVLEVVDSCPCNANSKWCCKRPPPPPFFSPPSNGQNLTRPGGSGADHCGEIDFKYGCPLPEGSHHMDLSDIAMGRLQGNGSLADGVIPIRYRRVPCPKPGNIYIWLHDGAGPYYFALSAVNTNGPGSVISIEVQAGGSGPWVALEHDPNYTSSRPQERYGSWVLPQGKGPITVPVSMRLTAPNGQQVVKEGAITSYTPPATAVEGFWYIDLGVQFTGSTYSSGSSSGSGSSSSSSSTTTKATSTTLKTTSTTSSGSSSTSAAQSACTLQSETHPPLTWQKCSSGGTCTQQTGSVVIDANWRWTHATNSSTNCYDGNTWSSTLCPDNETCAKNCCLDGAAYASTYGVTTSGNSLSIGFVTQSAQKNVGARLYLMASDTTYQEFTLLGNEFSFDVDVSQLPCGLNGALYFVSMDADGGVSKYPTNTAGAKYGTGYCDSQCPRDLKFINGQANVEGWEPSSNNANTGIGGHGSCCSEMDIWEANSISEALTPHPCTTVGQEICEGDGCGGTYSDNRYGGTCDPDGCDWNPYRLGNTSFYGPGSSFTLDTTKKLTVVTQFETSGAINRYYVQNGVTFQQPNAELGSYSGNELNDDYCTAEEAEFGGSSFSDKGGLTQFKKATSGGMVLVMSLWDDYYANMLWLDSTYPTNETSSTPGAVRGSCSTSSGVPAQVESQSPNAKVTFSNIKFGPIGSTGNPSGGNPPGGNPPGTTTTRRPATTTGSSPGPTQSHYGQCGGIGYSGPTVCASGTTCQVLNPYYSQCL

SEQ ID NO: 81 - DNA, 2943 bp, artificial sequence; identical to SEQ ID NO: 77
  synthetic fusion protein
  CDS (1)..(2943)

SEQ ID NO: 82 - protein, 980 aa, artificial sequence; identical to SEQ ID NO: 78
  Synthetic Construct

SEQ ID NO: 83 - DNA, 3081 bp, artificial sequence; identical to SEQ ID NO: 79
  synthetic fusion protein
  CDS (1)..(3081)

SEQ ID NO: 84 - protein, 1026 aa, artificial sequence; identical to SEQ ID NO: 80
  Synthetic Construct

SEQ ID NO: 85 - DNA, 2793 bp, artificial sequence
  synthetic fusion protein
  CDS (1)..(2793)
cagagcagctgcgtctcggcttggggtcaatgtggcggtatttcttataccgggtctacctgctgtcagagtgggaatacctgcgccgagattaactcgtactactaccagtgcataccagcaacagctgtgagtacttcaactaccacagtgacatctccctctagctctggttcgtcttctgccaacacgtcaggttatacaacgacgactgtcttgcccagtcccacggcaacacagaacccttatcctccggccaatgccagctcatgtggatcgtgggctctcgttgataacgtttgctgcccatactactgtctctcggataatgaatccgagtcctgcacgagcagctgtaccggcggctgcggcagtcctgattcctccatgtgcaagtccgggacgatgtggggagagcaacacaccgtaacttccaacgaggactggcattacagccgctcaacacactttggtctgaccagcggtggcgcctgcgggttcggtctgtacggcctctgcaccaagaacagtgtcaccgcgagctggacagacccaatgctgggctctacctgcgacgccttctgcaccgcgtatccgctcctctgcaaagaccccgctaacgtcactctccgcgggaactttgctgccccgaacggagactactacactcagttctggccttccctggctgcatccggcaatcccgacaactacctctcttgcggggagtgtttcgaggtcatccgcaccaagcccgacgggacagactacgccgtcggcgagagcggatataccgaccccatagtcctcgaggtagtagacagctgtccctgcaatgccaattcaaaatggtgctgtaagcggccccccccccccccctttttttccccgccttccaacggacaaaatctcacaagaccaggcggcagcggcgcagaccactgcggcgaaatcgacttcaagtacggctgtcctctgccggaaggatcccatcacatggacctctccgatattgccatgggccgactccagggaaacggcagtctcgccgacggtgtgattcccatccgctaccggcgtgtcccctgtcccaagccggggaacatctacatctggcttcatgatggggcgggaccgtattattttgcgctgagcgcggtcaataccaacggccccggctccgtaatcagtatcgaagtccaggctggtggctccgggccatgggttgccctcgagcacgatccgaactacaccagtagccggccgcaggagcggtatggctcttgggtcctcccgcagggcaagggacccattactgtgcctgtttcgatgaggctgacggcgcccaatgggcagcaggtggttaaggagggcgccattaccagctataccccgccggcgactgcggtcgagggcttttggtatattgatctgggagtgcagttcacccaagcttgctcaagcgtctggggccaatgtggtggccagaattggtcgggtccgacttgctgtgcttccggaagcacatgcgtctactccaacgactattactcccagtgtcttcccggcgctgcaagctcaagctcgtccacgcgcgccgcgtcgacgacttctcgagtatcccccacaacatcccggtcgagctccgcgacgcctccacctggttctactactaccagagtacctccagtcggatcgggaaccgctacgtattcaggcaacccttttgttggggtcactccttgggccaatgcatattacgcctctgaagttagcagcctcgctattcctagcttgactggagccatggccactgctgcagcagctgtcgcaaaggttccctcttttatgtggctagatactcttgacaagacccctctcatggagcaaaccttggccgacatccgcaccgccaacaagaatggcggtaactatgcgggacagtttgtggtgtatgacttgccggatcgcgattgcgctgcccttgcctcgaatggcgaatactctattgccgatggtggcgtcgccaaatataagaactatatcgacaccattcgtcaaattgtcgtggaatattccgatatccggaccctcctggttattgagcctgactctcttgccaacctggtgaccaacctcggtactccaaagtgtgccaatgctcagtcagcctaccttgagtgcatcaactacgccgtcacacagctgaaccttccaaatgttgcgatgtatttggacgctggccatgcaggatggcttggctggccggcaaaccaagacccggccgctcagctatttgcaaatgtttacaagaatgcatcgtctccgagagctcttcgcggattggcaaccaatgtcgccaactacaacgggtggaacattaccagccccccatcgtacacgcaaggcaacgctgtctacaacgagaagctgtacatccacgctattggacgtcttcttgccaatcacggctggtccaacgccttcttcatcactgatcaaggtcgatcgggaaagcagcctaccggacagcaacagtggggagactggtgcaatgtgatcggcaccggatttggtattcgcccatccgcaaacactggggactcgttgctggattcgtttgtctgggtcaagccaggcggcgagtgtgacggcaccagcgacagcagtgcgccacgatttgactcccactgtgcgctcccagatgccttgcaaccggcggctcaagctggtgcttggttccaagcctactttgtgcagcttctcacaaacgcaaacccatcgttcctgtaa

SEQ ID NO: 86 - protein, 930 aa, artificial sequence
  Synthetic Construct
QSSCVSAWGQCGGISYTGSTCCQSGNTCAEINSYYYQCIPATAVSTSTTTVTSPSSSGSSSANTSGYTTTTVLPSPTATQNPYPPANASSCGSWALVDNVCCPYYCLSDNESESCTSSCTGGCGSPDSSMCKSGTMWGEQHTVTSNEDWHYSRSTHFGLTSGGACGFGLYGLCTKNSVTASWTDPMLGSTCDAFCTAYPLLCKDPANVTLRGNFAAPNGDYYTQFWPSLAASGNPDNYLSCGECFEVIRTKPDGTDYAVGESGYTDPIVLEVVDSCPCNANSKWCCKRPPPPPFFSPPSNGQNLTRPGGSGADHCGEIDFKYGCPLPEGSHHMDLSDIAMGRLQGNGSLADGVIPIRYRRVPCPKPGNIYIWLHDGAGPYYFALSAVNTNGPGSVISIEVQAGGSGPWVALEHDPNYTSSRPQERYGSWVLPQGKGPITVPVSMRLTAPNGQQVVKEGAITSYTPPATAVEGFWYIDLGVQFTQACSSVWGQCGGQNWSGPTCCASGSTCVYSNDYYSQCLPGAASSSSSTRAASTTSRVSPTTSRSSSATPPPGSTTTRVPPVGSGTATYSGNPFVGVTPWANAYYASEVSSLAIPSLTGAMATAAAAVAKVPSFMWLDTLDKTPLMEQTLADIRTANKNGGNYAGQFVVYDLPDRDCAALASNGEYSIADGGVAKYKNYIDTIRQIVVEYSDIRTLLVIEPDSLANLVTNLGTPKCANAQSAYLECINYAVTQLNLPNVAMYLDAGHAGWLGWPANQDPAAQLFANVYKNASSPRALRGLATNVANYNGWNITSPPSYTQGNAVYNEKLYIHAIGRLLANHGWSNAFFITDQGRSGKQPTGQQQWGDWCNVIGTGFGIRPSANTGDSLLDSFVWVKPGGECDGTSDSSAPRFDSHCALPDALQPAAQAGAWFQAYFVQLLTNANPSFL

SEQ ID NO: 87 - DNA, 2931 bp, artificial sequence
  synthetic fusion protein
  CDS (1)..(2931)
cagagcagctgcgtctcggcttggggtcaatgtggcggtatttcttataccgggtctacctgctgtcagagtgggaatacctgcgccgagattaactcgtactactaccagtgcataccagcaacagctgtgagtacttcaactaccacagtgacatctccctctagctctggttcgtcttctgccaacacgtcaggttatacaacgacgactgtcttgcccagtcccacggcaacacagaacccttatcctccggccaatgccagctcatgtggatcgtgggctctcgttgataacgtttgctgcccatactactgtctctcggataatgaatccgagtcctgcacgagcagctgtaccggcggctgcggcagtcctgattcctccatgtgcaagtccgggacgatgtggggagagcaacacaccgtaacttccaacgaggactggcattacagccgctcaacacactttggtctgaccagcggtggcgcctgcgggttcggtctgtacggcctctgcaccaagaacagtgtcaccgcgagctggacagacccaatgctgggctctacctgcgacgccttctgcaccgcgtatccgctcctctgcaaagaccccgctaacgtcactctccgcgggaactttgctgccccgaacggagactactacactcagttctggccttccctggctgcatccggcaatcccgacaactacctctcttgcggggagtgtttcgaggtcatccgcaccaagcccgacgggacagactacgccgtcggcgagagcggatataccgaccccatagtcctcgaggtagtagacagctgtccctgcaatgccaattcaaaatggtgctgtaagcggccccccccccccccctttttttccccgccttccaacggacaaaatctcacaagaccaggcggcagcggcgcagaccactgcggcgaaatcgacttcaagtacggctgtcctctgccggaaggatcccatcacatggacctctccgatattgccatgggccgactccagggaaacggcagtctcgccgacggtgtgattcccatccgctaccggcgtgtcccctgtcccaagccggggaacatctacatctggcttcatgatggggcgggaccgtattattttgcgctgagcgcggtcaataccaacggccccggctccgtaatcagtatcgaagtccaggctggtggctccgggccatgggttgccctcgagcacgatccgaactacaccagtagccggccgcaggagcggtatggctcttgggtcctcccgcagggcaagggacccattactgtgcctgtttcgatgaggctgacggcgcccaatgggcagcaggtggttaaggagggcgccattaccagctataccccgccggcgactgcggtcgagggcttttggtatattgatctgggagtgcagttcaccggctcgacttactccagtggatcttcttcggggtcggggtctagctccagctcgagttcgactaccactaaggccacttcgacgaccttgaagactacctcgaccaccagcagtggaagcagttcgacatcggcggcgcaagcttgctcaagcgtctggggccaatgtggtggccagaattggtcgggtccgacttgctgtgcttccggaagcacatgcgtctactccaacgactattactcccagtgtcttcccggcgctgcaagctcaagctcgtccacgcgcgccgcgtcgacgacttctcgagtatcccccacaacatcccggtcgagctccgcgacgcctccacctggttctactactaccagagtacctccagtcggatcgggaaccgctacgtattcaggcaacccttttgttggggtcactccttgggccaatgcatattacgcctctgaagttagcagcctcgctattcctagcttgactggagccatggccactgctgcagcagctgtcgcaaaggttccctcttttatgtggctagatactcttgacaagacccctctcatggagcaaaccttggccgacatccgcaccgccaacaagaatggcggtaactatgcgggacagtttgtggtgtatgacttgccggatcgcgattgcgctgcccttgcctcgaatggcgaatactctattgccgatggtggcgtcgccaaatataagaactatatcgacaccattcgtcaaattgtcgtggaatattccgatatccggaccctcctggttattgagcctgactctcttgccaacctggtgaccaacctcggtactccaaagtgtgccaatgctcagtcagcctaccttgagtgcatcaactacgccgtcacacagctgaaccttccaaatgttgcgatgtatttggacgctggccatgcaggatggcttggctggccggcaaaccaagacccggccgctcagctatttgcaaatgtttacaagaatgcatcgtctccgagagctcttcgcggattggcaaccaatgtcgccaactacaacgggtggaacattaccagccccccatcgtacacgcaaggcaacgctgtctacaacgagaagctgtacatccacgctattggacgtcttcttgccaatcacggctggtccaacgccttcttcatcactgatcaaggtcgatcgggaaagcagcctaccggacagcaacagtggggagactggtgcaatgtgatcggcaccggatttggtattcgcccatccgcaaacactggggactcgttgctggattcgtttgtctgggtcaagccaggcggcgagtgtgacggcaccagcgacagcagtgcgccacgatttgactcccactgtgcgctcccagatgccttgcaaccggcggctcaagctggtgcttggttccaagcctactttgtgcagcttctcacaaacgcaaacccatcgttcctgtaa

SEQ ID NO: 88 - protein, 976 aa, artificial sequence
  Synthetic Construct
QSSCVSAWGQCGGISYTGSTCCQSGNTCAEINSYYYQCIPATAVSTSTTTVTSPSSSGSSSANTSGYTTTTVLPSPTATQNPYPPANASSCGSWALVDNVCCPYYCLSDNESESCTSSCTGGCGSPDSSMCKSGTMWGEQHTVTSNEDWHYSRSTHFGLTSGGACGFGLYGLCTKNSVTASWTDPMLGSTCDAFCTAYPLLCKDPANVTLRGNFAAPNGDYYTQFWPSLAASGNPDNYLSCGECFEVIRTKPDGTDYAVGESGYTDPIVLEVVDSCPCNANSKWCCKRPPPPPFFSPPSNGQNLTRPGGSGADHCGEIDFKYGCPLPEGSHHMDLSDIAMGRLQGNGSLADGVIPIRYRRVPCPKPGNIYIWLHDGAGPYYFALSAVNTNGPGSVISIEVQAGGSGPWVALEHDPNYTSSRPQERYGSWVLPQGKGPITVPVSMRLTAPNGQQVVKEGAITSYTPPATAVEGFWYIDLGVQFTGSTYSSGSSSGSGSSSSSSSTTTKATSTTLKTTSTTSSGSSSTSAAQACSSVWGQCGGQNWSGPTCCASGSTCVYSNDYYSQCLPGAASSSSSTRAASTTSRVSPTTSRSSSATPPPGSTTTRVPPVGSGTATYSGNPFVGVTPWANAYYASEVSSLAIPSLTGAMATAAAAVAKVPSFMWLDTLDKTPLMEQTLADIRTANKNGGNYAGQFVVYDLPDRDCAALASNGEYSIADGGVAKYKNYIDTIRQIVVEYSDIRTLLVIEPDSLANLVTNLGTPKCANAQSAYLECINYAVTQLNLPNVAMYLDAGHAGWLGWPANQDPAAQLFANVYKNASSPRALRGLATNVANYNGWNITSPPSYTQGNAVYNEKLYIHAIGRLLANHGWSNAFFITDQGRSGKQPTGQQQWGDWCNVIGTGFGIRPSANTGDSLLDSFVWVKPGGECDGTSDSSAPRFDSHCALPDALQPAAQAGAWFQAYFVQLLTNANPSFL

SEQ ID NO: 89 - DNA, 2679 bp, artificial sequence
  synthetic fusion protein
  CDS (1)..(2679)
cagagcagctgcgtctcggcttggggtcaatgtggcggtatttcttataccgggtctacctgctgtcagagtgggaatacctgcgccgagattaactcgtactactaccagtgcataccagcaacagctgtgagtacttcaactaccacagtgacatctccctctagctctggttcgtcttctgccaacacgtcaggttatacaacgacgactgtcttgcccagtcccacggcaacacagaacccttatcctccggccaatgccagctcatgtggatcgtgggctctcgttgataacgtttgctgcccatactactgtctctcggataatgaatccgagtcctgcacgagcagctgtaccggcggctgcggcagtcctgattcctccatgtgcaagtccgggacgatgtggggagagcaacacaccgtaacttccaacgaggactggcattacagccgctcaacacactttggtctgaccagcggtggcgcctgcgggttcggtctgtacggcctctgcaccaagaacagtgtcaccgcgagctggacagacccaatgctgggctctacctgcgacgccttctgcaccgcgtatccgctcctctgcaaagaccccgctaacgtcactctccgcgggaactttgctgccccgaacggagactactacactcagttctggccttccctggctgcatccggcaatcccgacaactacctctcttgcggggagtgtttcgaggtcatccgcaccaagcccgacgggacagactacgccgtcggcgagagcggatataccgaccccatagtcctcgaggtagtagacagctgtccctgcaatgccaattcaaaatggtgctgtaagcggccccccccccccccctttttttccccgccttccaacggacaaaatctcacaagaccaggcggcagcggcgcagaccactgcggcgaaatcgacttcaagtacggctgtcctctgccggaaggatcccatcacatggacctctccgatattgccatgggccgactccagggaaacggcagtctcgccgacggtgtgattcccatccgctaccggcgtgtcccctgtcccaagccggggaacatctacatctggcttcatgatggggcgggaccgtattattttgcgctgagcgcggtcaataccaacggccccggctccgtaatcagtatcgaagtccaggctggtggctccgggccatgggttgccctcgagcacgatccgaactacaccagtagccggccgcaggagcggtatggctcttgggtcctcccgcagggcaagggacccattactgtgcctgtttcgatgaggctgacggcgcccaatgggcagcaggtggttaaggagggcgccattaccagctataccccgccggcgactgcggtcgagggcttttggtatattgatctgggagtgcagttcacccccggcgctgcaagctcaagctcgtccacgcgcgccgcgtcgacgacttctcgagtatcccccacaacatcccggtcgagctccgcgacgcctccacctggttctactactaccagagtacctccagtcggatcgggaaccgctacgtattcaggcaacccttttgttggggtcactccttgggccaatgcatattacgcctctgaagttagcagcctcgctattcctagcttgactggagccatggccactgctgcagcagctgtcgcaaaggttccctcttttatgtggctagatactcttgacaagacccctctcatggagcaaaccttggccgacatccgcaccgccaacaagaatggcggtaactatgcgggacagtttgtggtgtatgacttgccggatcgcgattgcgctgcccttgcctcgaatggcgaatactctattgccgatggtggcgtcgccaaatataagaactatatcgacaccattcgtcaaattgtcgtggaatattccgatatccggaccctcctggttattgagcctgactctcttgccaacctggtgaccaacctcggtactccaaagtgtgccaatgctcagtcagcctaccttgagtgcatcaactacgccgtcacacagctgaaccttccaaatgttgcgatgtatttggacgctggccatgcaggatggcttggctggccggcaaaccaagacccggccgctcagctatttgcaaatgtttacaagaatgcatcgtctccgagagctcttcgcggattggcaaccaatgtcgccaactacaacgggtggaacattaccagccccccatcgtacacgcaaggcaacgctgtctacaacgagaagctgtacatccacgctattggacgtcttcttgccaatcacggctggtccaacgccttcttcatcactgatcaaggtcgatcgggaaagcagcctaccggacagcaacagtggggagactggtgcaatgtgatcggcaccggatttggtattcgcccatccgcaaacactggggactcgttgctggattcgtttgtctgggtcaagccaggcggcgagtgtgacggcaccagcgacagcagtgcgccacgatttgactcccactgtgcgctcccagatgccttgcaaccggcggctcaagctggtgcttggttccaagcctactttgtgcagcttctcacaaacgcaaacccatcgttcctgtaa

SEQ ID NO: 90 - protein, 892 aa, artificial sequence
  Synthetic Construct
QSSCVSAWGQCGGISYTGSTCCQSGNTCAEINSYYYQCIPATAVSTSTTTVTSPSSSGSSSANTSGYTTTTVLPSPTATQNPYPPANASSCGSWALVDNVCCPYYCLSDNESESCTSSCTGGCGSPDSSMCKSGTMWGEQHTVTSNEDWHYSRSTHFGLTSGGACGFGLYGLCTKNSVTASWTDPMLGSTCDAFCTAYPLLCKDPANVTLRGNFAAPNGDYYTQFWPSLAASGNPDNYLSCGECFEVIRTKPDGTDYAVGESGYTDPIVLEVVDSCPCNANSKWCCKRPPPPPFFSPPSNGQNLTRPGGSGADHCGEIDFKYGCPLPEGSHHMDLSDIAMGRLQGNGSLADGVIPIRYRRVPCPKPGNIYIWLHDGAGPYYFALSAVNTNGPGSVISIEVQAGGSGPWVALEHDPNYTSSRPQERYGSWVLPQGKGPITVPVSMRLTAPNGQQVVKEGAITSYTPPATAVEGFWYIDLGVQFTPGAASSSSSTRAASTTSRVSPTTSRSSSATPPPGSTTTRVPPVGSGTATYSGNPFVGVTPWANAYYASEVSSLAIPSLTGAMATAAAAVAKVPSFMWLDTLDKTPLMEQTLADIRTANKNGGNYAGQFVVYDLPDRDCAALASNGEYSIADGGVAKYKNYIDTIRQIVVEYSDIRTLLVIEPDSLANLVTNLGTPKCANAQSAYLECINYAVTQLNLPNVAMYLDAGHAGWLGWPANQDPAAQLFANVYKNASSPRALRGLATNVANYNGWNITSPPSYTQGNAVYNEKLYIHAIGRLLANHGWSNAFFITDQGRSGKQPTGQQQWGDWCNVIGTGFGIRPSANTGDSLLDSFVWVKPGGECDGTSDSSAPRFDSHCALPDALQPAAQAGAWFQAYFVQLLTNANPSFL

SEQ ID NO: 91 - DNA, 2817 bp, artificial sequence
  synthetic fusion protein
  CDS (1)..(2817)
cagagcagctgcgtctcggcttggggtcaatgtggcggtatttcttataccgggtctacctgctgtcagagtgggaatacctgcgccgagattaactcgtactactaccagtgcataccagcaacagctgtgagtacttcaactaccacagtgacatctccctctagctctggttcgtcttctgccaacacgtcaggttatacaacgacgactgtcttgcccagtcccacggcaacacagaacccttatcctccggccaatgccagctcatgtggatcgtgggctctcgttgataacgtttgctgcccatactactgtctctcggataatgaatccgagtcctgcacgagcagctgtaccggcggctgcggcagtcctgattcctccatgtgcaagtccgggacgatgtggggagagcaacacaccgtaacttccaacgaggactggcattacagccgctcaacacactttggtctgaccagcggtggcgcctgcgggttcggtctgtacggcctctgcaccaagaacagtgtcaccgcgagctggacagacccaatgctgggctctacctgcgacgccttctgcaccgcgtatccgctcctctgcaaagaccccgctaacgtcactctccgcgggaactttgctgccccgaacggagactactacactcagttctggccttccctggctgcatccggcaatcccgacaactacctctcttgcggggagtgtttcgaggtcatccgcaccaagcccgacgggacagactacgccgtcggcgagagcggatataccgaccccatagtcctcgaggtagtagacagctgtccctgcaatgccaattcaaaatggtgctgtaagcggccccccccccccccctttttttccccgccttccaacggacaaaatctcacaagaccaggcggcagcggcgcagaccactgcggcgaaatcgacttcaagtacggctgtcctctgccggaaggatcccatcacatggacctctccgatattgccatgggccgactccagggaaacggcagtctcgccgacggtgtgattcccatccgctaccggcgtgtcccctgtcccaagccggggaacatctacatctggcttcatgatggggcgggaccgtattattttgcgctgagcgcggtcaataccaacggccccggctccgtaatcagtatcgaagtccaggctggtggctccgggccatgggttgccctcgagcacgatccgaactacaccagtagccggccgcaggagcggtatggctcttgggtcctcccgcagggcaagggacccattactgtgcctgtttcgatgaggctgacggcgcccaatgggcagcaggtggttaaggagggcgccattaccagctataccccgccggcgactgcggtcgagggcttttggtatattgatctgggagtgcagttcaccggctcgacttactccagtggatcttcttcggggtcggggtctagctccagctcgagttcgactaccactaaggccacttcgacgaccttgaagactacctcgaccaccagcagtggaagcagttcgacatcggcggcgcccggcgctgcaagctcaagctcgtccacgcgcgccgcgtcgacgacttctcgagtatcccccacaacatcccggtcgagctccgcgacgcctccacctggttctactactaccagagtacctccagtcggatcgggaaccgctacgtattcaggcaacccttttgttggggtcactccttgggccaatgcatattacgcctctgaagttagcagcctcgctattcctagcttgactggagccatggccactgctgcagcagctgtcgcaaaggttccctcttttatgtggctagatactcttgacaagacccctctcatggagcaaaccttggccgacatccgcaccgccaacaagaatggcggtaactatgcgggacagtttgtggtgtatgacttgccggatcgcgattgcgctgcccttgcctcgaatggcgaatactctattgccgatggtggcgtcgccaaatataagaactatatcgacaccattcgtcaaattgtcgtggaatattccgatatccggaccctcctggttattgagcctgactctcttgccaacctggtgaccaacctcggtactccaaagtgtgccaatgctcagtcagcctaccttgagtgcatcaactacgccgtcacacagctgaaccttccaaatgttgcgatgtatttggacgctggccatgcaggatggcttggctggccggcaaaccaagacccggccgctcagctatttgcaaatgtttacaagaatgcatcgtctccgagagctcttcgcggattggcaaccaatgtcgccaactacaacgggtggaacattaccagccccccatcgtacacgcaaggcaacgctgtctacaacgagaagctgtacatccacgctattggacgtcttcttgccaatcacggctggtccaacgccttcttcatcactgatcaaggtcgatcgggaaagcagcctaccggacagcaacagtggggagactggtgcaatgtgatcggcaccggatttggtattcgcccatccgcaaacactggggactcgttgctggattcgtttgtctgggtcaagccaggcggcgagtgtgacggcaccagcgacagcagtgcgccacgatttgactcccactgtgcgctcccagatgccttgcaaccggcggctcaagctggtgcttggttccaagcctactttgtgcagcttctcacaaacgcaaacccatcgttcctgtaa

SEQ ID NO: 92 - protein, 938 aa, artificial sequence
  Synthetic Construct
QSSCVSAWGQCGGISYTGSTCCQSGNTCAEINSYYYQCIPATAVSTSTTTVTSPSSSGSSSANTSGYTTTTVLPSPTATQNPYPPANASSCGSWALVDNVCCPYYCLSDNESESCTSSCTGGCGSPDSSMCKSGTMWGEQHTVTSNEDWHYSRSTHFGLTSGGACGFGLYGLCTKNSVTASWTDPMLGSTCDAFCTAYPLLCKDPANVTLRGNFAAPNGDYYTQFWPSLAASGNPDNYLSCGECFEVIRTKPDGTDYAVGESGYTDPIVLEVVDSCPCNANSKWCCKRPPPPPFFSPPSNGQNLTRPGGSGADHCGEIDFKYGCPLPEGSHHMDLSDIAMGRLQGNGSLADGVIPIRYRRVPCPKPGNIYIWLHDGAGPYYFALSAVNTNGPGSVISIEVQAGGSGPWVALEHDPNYTSSRPQERYGSWVLPQGKGPITVPVSMRLTAPNGQQVVKEGAITSYTPPATAVEGFWYIDLGVQFTGSTYSSGSSSGSGSSSSSSSTTTKATSTTLKTTSTTSSGSSSTSAAPGAASSSSSTRAASTTSRVSPTTSRSSSATPPPGSTTTRVPPVGSGTATYSGNPFVGVTPWANAYYASEVSSLAIPSLTGAMATAAAAVAKVPSFMWLDTLDKTPLMEQTLADIRTANKNGGNYAGQFVVYDLPDRDCAALASNGEYSIADGGVAKYKNYIDTIRQIVVEYSDIRTLLVIEPDSLANLVTNLGTPKCANAQSAYLECINYAVTQLNLPNVAMYLDAGHAGWLGWPANQDPAAQLFANVYKNASSPRALRGLATNVANYNGWNITSPPSYTQGNAVYNEKLYIHAIGRLLANHGWSNAFFITDQGRSGKQPTGQQQWGDWCNVIGTGFGIRPSANTGDSLLDSFVWVKPGGECDGTSDSSAPRFDSHCALPDALQPAAQAGAWFQAYFVQLLTNANPSFL

SEQ ID NO: 93 - DNA, 2763 bp, artificial sequence
  synthetic fusion protein
  CDS (1)..(2763)
cagagcagctgcgtctcggcttggggtcaatgtggcggtatttcttataccgggtctacctgctgtcagagtgggaatacctgcgccgagattaactcgtactactaccagtgcataccagcaacagctgtgagtacttcaactaccacagtgacatctccctctagctctggttcgtcttctgccaacacgtcaggttatacaacgacgactgtcttgcccagtcccacggcaacacagaacccttatcctccggccaatgccagctcatgtggatcgtgggctctcgttgataacgtttgctgcccatactactgtctctcggataatgaatccgagtcctgcacgagcagctgtaccggcggctgcggcagtcctgattcctccatgtgcaagtccgggacgatgtggggagagcaacacaccgtaacttccaacgaggactggcattacagccgctcaacacactttggtctgaccagcggtggcgcctgcgggttcggtctgtacggcctctgcaccaagaacagtgtcaccgcgagctggacagacccaatgctgggctctacctgcgacgccttctgcaccgcgtatccgctcctctgcaaagaccccgctaacgtcactctccgcgggaactttgctgccccgaacggagactactacactcagttctggccttccctggctgcatccggcaatcccgacaactacctctcttgcggggagtgtttcgaggtcatccgcaccaagcccgacgggacagactacgccgtcggcgagagcggatataccgaccccatagtcctcgaggtagtagacagctgtccctgcaatgccaattcaaaatggtgctgtaagcggccccccccccccccctttttttccccgccttccaacggacaaaatctcacaagaccaggcggcagcggcgcagaccactgcggcgaaatcgacttcaagtacggctgtcctctgccggaaggatcccatcacatggacctctccgatattgccatgggccgactccagggaaacggcagtctcgccgacggtgtgattcccatccgctaccggcgtgtcccctgtcccaagccggggaacatctacatctggcttcatgatggggcgggaccgtattattttgcgctgagcgcggtcaataccaacggccccggctccgtaatcagtatcgaagtccaggctggtggctccgggccatgggttgccctcgagcacgatccgaactacaccagtagccggccgcaggagcggtatggctcttgggtcctcccgcagggcaagggacccattactgtgcctgtttcgatgaggctgacggcgcccaatgggcagcaggtggttaaggagggcgccattaccagctataccccgccggcgactgcggtcgagggcttttggtatattgatctgggagtgcagttcacccagcaaccgggtaccagcacccccgaggtccatcccaagttgacaacctacaagtgtacaaagtccggggggtgcgtggcccaggacacctcggtggtccttgactggaactaccgctggatgcacgacgcaaactacaactcgtgcaccgtcaacggcggcgtcaacaccacgctctgccctgacgaggcgacctgtggcaagaactgcttcatcgagggcgtcgactacgccgcctcgggcgtcacgacctcgggcagcagcctcaccatgaaccagtacatgcccagcagctctggcggctacagcagcgtctctcctcggctgtatctcctggactctgacggtgagtacgtgatgctgaagctcaacggccaggagctgagcttcgacgtcgacctctctgctctgccgtgtggagagaacggctcgctctacctgtctcagatggacgagaacgggggcgccaaccagtataacacggccggtgccaactacgggagcggctactgcgatgctcagtgccccgtccagacatggaggaacggcaccctcaacactagccaccagggcttctgctgcaacgagatggatatcctggagggcaactcgagggcgaatgccttgacccctcactcttgcacggccacggcctgcgactctgccggttgcggcttcaacccctatggcagcggctacaaaagctactacggccccggagataccgttgacacctccaagaccttcaccatcatcacccagttcaacacggacaacggctcgccctcgggcaaccttgtgagcatcacccgcaagtaccagcaaaacggcgtcgacatccccagcgcccagcccggcggcgacaccatctcgtcctgcccgtccgcctcagcctacggcggcctcgccaccatgggcaaggccctgagcagcggcatggtgctcgtgttcagcatttggaacgacaacagccagtacatgaactggctcgacagcggcaacgccggcccctgcagcagcaccgagggcaacccatccaacatcctggccaacaaccccaacacgcacgtcgtcttctccaacatccgctggggagacattgggtctactacgaactcgactgcgcccccgcccccgcctgcgtccagcacgacgttttcgactacacggaggagctcgacgacttcgagcagcccgagctgcacgcagactcactgggggcagtgcggtggcattgggtacagcgggtgcaagacgtgcacgtcgggcactacgtgccagtatagcaacgactactactcgcaatgcctttag

SEQ ID NO: 94 - protein, 920 aa, artificial sequence
  Synthetic Construct
QSSCVSAWGQCGGISYTGSTCCQSGNTCAEINSYYYQCIPATAVSTSTTTVTSPSSSGSSSANTSGYTTTTVLPSPTATQNPYPPANASSCGSWALVDNVCCPYYCLSDNESESCTSSCTGGCGSPDSSMCKSGTMWGEQHTVTSNEDWHYSRSTHFGLTSGGACGFGLYGLCTKNSVTASWTDPMLGSTCDAFCTAYPLLCKDPANVTLRGNFAAPNGDYYTQFWPSLAASGNPDNYLSCGECFEVIRTKPDGTDYAVGESGYTDPIVLEVVDSCPCNANSKWCCKRPPPPPFFSPPSNGQNLTRPGGSGADHCGEIDFKYGCPLPEGSHHMDLSDIAMGRLQGNGSLADGVIPIRYRRVPCPKPGNIYIWLHDGAGPYYFALSAVNTNGPGSVISIEVQAGGSGPWVALEHDPNYTSSRPQERYGSWVLPQGKGPITVPVSMRLTAPNGQQVVKEGAITSYTPPATAVEGFWYIDLGVQFTQQPGTSTPEVHPKLTTYKCTKSGGCVAQDTSVVLDWNYRWMHDANYNSCTVNGGVNTTLCPDEATCGKNCFIEGVDYAASGVTTSGSSLTMNQYMPSSSGGYSSVSPRLYLLDSDGEYVMLKLNGQELSFDVDLSALPCGENGSLYLSQMDENGGANQYNTAGANYGSGYCDAQCPVQTWRNGTLNTSHQGFCCNEMDILEGNSRANALTPHSCTATACDSAGCGFNPYGSGYKSYYGPGDTVDTSKTFTIITQFNTDNGSPSGNLVSITRKYQQNGVDIPSAQPGGDTISSCPSASAYGGLATMGKALSSGMVLVFSIWNDNSQYMNWLDSGNAGPCSSTEGNPSNILANNPNTHVVFSNIRWGDIGSTTNSTAPPPPPASSTTFSTTRRSSTTSSSPSCTQTHWGQCGGIGYSGCKTCTSGTTCQYSNDYYSQCL

SEQ ID NO: 95 - DNA, 2901 bp, artificial sequence
  synthetic fusion protein
  CDS (1)..(2901)
cagagcagctgcgtctcggcttggggtcaatgtggcggtatttcttataccgggtctacctgctgtcagagtgggaatacctgcgccgagattaactcgtactactaccagtgcataccagcaacagctgtgagtacttcaactaccacagtgacatctccctctagctctggttcgtcttctgccaacacgtcaggttatacaacgacgactgtcttgcccagtcccacggcaacacagaacccttatcctccggccaatgccagctcatgtggatcgtgggctctcgttgataacgtttgctgcccatactactgtctctcggataatgaatccgagtcctgcacgagcagctgtaccggcggctgcggcagtcctgattcctccatgtgcaagtccgggacgatgtggggagagcaacacaccgtaacttccaacgaggactggcattacagccgctcaacacactttggtctgaccagcggtggcgcctgcgggttcggtctgtacggcctctgcaccaagaacagtgtcaccgcgagctggacagacccaatgctgggctctacctgcgacgccttctgcaccgcgtatccgctcctctgcaaagaccccgctaacgtcactctccgcgggaactttgctgccccgaacggagactactacactcagttctggccttccctggctgcatccggcaatcccgacaactacctctcttgcggggagtgtttcgaggtcatccgcaccaagcccgacgggacagactacgccgtcggcgagagcggatataccgaccccatagtcctcgaggtagtagacagctgtccctgcaatgccaattcaaaatggtgctgtaagcggccccccccccccccctttttttccccgccttccaacggacaaaatctcacaagaccaggcggcagcggcgcagaccactgcggcgaaatcgacttcaagtacggctgtcctctgccggaaggatcccatcacatggacctctccgatattgccatgggccgactccagggaaacggcagtctcgccgacggtgtgattcccatccgctaccggcgtgtcccctgtcccaagccggggaacatctacatctggcttcatgatggggcgggaccgtattattttgcgctgagcgcggtcaataccaacggccccggctccgtaatcagtatcgaagtccaggctggtggctccgggccatgggttgccctcgagcacgatccgaactacaccagtagccggccgcaggagcggtatggctcttgggtcctcccgcagggcaagggacccattactgtgcctgtttcgatgaggctgacggcgcccaatgggcagcaggtggttaaggagggcgccattaccagctataccccgccggcgactgcggtcgagggcttttggtatattgatctgggagtgcagttcaccggctcgacttactccagtggatcttcttcggggtcggggtctagctccagctcgagttcgactaccactaaggccacttcgacgaccttgaagactacctcgaccaccagcagtggaagcagttcgacatcggcggcgcagcaaccgggtaccagcacccccgaggtccatcccaagttgacaacctacaagtgtacaaagtccggggggtgcgtggcccaggacacctcggtggtccttgactggaactaccgctggatgcacgacgcaaactacaactcgtgcaccgtcaacggcggcgtcaacaccacgctctgccctgacgaggcgacctgtggcaagaactgcttcatcgagggcgtcgactacgccgcctcgggcgtcacgacctcgggcagcagcctcaccatgaaccagtacatgcccagcagctctggcggctacagcagcgtctctcctcggctgtatctcctggactctgacggtgagtacgtgatgctgaagctcaacggccaggagctgagcttcgacgtcgacctctctgctctgccgtgtggagagaacggctcgctctacctgtctcagatggacgagaacgggggcgccaaccagtataacacggccggtgccaactacgggagcggctactgcgatgctcagtgccccgtccagacatggaggaacggcaccctcaacactagccaccagggcttctgctgcaacgagatggatatcctggagggcaactcgagggcgaatgccttgacccctcactcttgcacggccacggcctgcgactctgccggttgcggcttcaacccctatggcagcggctacaaaagctactacggccccggagataccgttgacacctccaagaccttcaccatcatcacccagttcaacacggacaacggctcgccctcgggcaaccttgtgagcatcacccgcaagtaccagcaaaacggcgtcgacatccccagcgcccagcccggcggcgacaccatctcgtcctgcccgtccgcctcagcctacggcggcctcgccaccatgggcaaggccctgagcagcggcatggtgctcgtgttcagcatttggaacgacaacagccagtacatgaactggctcgacagcggcaacgccggcccctgcagcagcaccgagggcaacccatccaacatcctggccaacaaccccaacacgcacgtcgtcttctccaacatccgctggggagacattgggtctactacgaactcgactgcgcccccgcccccgcctgcgtccagcacgacgttttcgactacacggaggagctcgacgacttcgagcagcccgagctgcacgcagactcactgggggcagtgcggtggcattgggtacagcgggtgcaagacgtgcacgtcgggcactacgtgccagtatagcaacgactactactcgcaatgcctttag

SEQ ID NO: 96 - protein, 966 aa, artificial sequence
  Synthetic Construct
QSSCVSAWGQCGGISYTGSTCCQSGNTCAEINSYYYQCIPATAVSTSTTTVTSPSSSGSSSANTSGYTTTTVLPSPTATQNPYPPANASSCGSWALVDNVCCPYYCLSDNESESCTSSCTGGCGSPDSSMCKSGTMWGEQHTVTSNEDWHYSRSTHFGLTSGGACGFGLYGLCTKNSVTASWTDPMLGSTCDAFCTAYPLLCKDPANVTLRGNFAAPNGDYYTQFWPSLAASGNPDNYLSCGECFEVIRTKPDGTDYAVGESGYTDPIVLEVVDSCPCNANSKWCCKRPPPPPFFSPPSNGQNLTRPGGSGADHCGEIDFKYGCPLPEGSHHMDLSDIAMGRLQGNGSLADGVIPIRYRRVPCPKPGNIYIWLHDGAGPYYFALSAVNTNGPGSVISIEVQAGGSGPWVALEHDPNYTSSRPQERYGSWVLPQGKGPITVPVSMRLTAPNGQQVVKEGAITSYTPPATAVEGFWYIDLGVQFTGSTYSSGSSSGSGSSSSSSSTTTKATSTTLKTTSTTSSGSSSTSAAQQPGTSTPEVHPKLTTYKCTKSGGCVAQDTSVVLDWNYRWMHDANYNSCTVNGGVNTTLCPDEATCGKNCFIEGVDYAASGVTTSGSSLTMNQYMPSSSGGYSSVSPRLYLLDSDGEYVMLKLNGQELSFDVDLSALPCGENGSLYLSQMDENGGANQYNTAGANYGSGYCDAQCPVQTWRNGTLNTSHQGFCCNEMDILEGNSRANALTPHSCTATACDSAGCGFNPYGSGYKSYYGPGDTVDTSKTFTIITQFNTDNGSPSGNLVSITRKYQQNGVDIPSAQPGGDTISSCPSASAYGGLATMGKALSSGMVLVFSIWNDNSQYMNWLDSGNAGPCSSTEGNPSNILANNPNTHVVFSNIRWGDIGSTTNSTAPPPPPASSTTFSTTRRSSTTSSSPSCTQTHWGQCGGIGYSGCKTCTSGTTCQYSNDYYSQCL

SEQ ID NO: 97 - DNA, 2649 bp, artificial sequence
  synthetic fusion protein
  CDS (1)..(2649)
cagagcagctgcgtctcggcttggggtcaatgtggcggtatttcttataccgggtctacctgctgtcagagtgggaatacctgcgccgagattaactcgtactactaccagtgcataccagcaacagctgtgagtacttcaactaccacagtgacatctccctctagctctggttcgtcttctgccaacacgtcaggttatacaacgacgactgtcttgcccagtcccacggcaacacagaacccttatcctccggccaatgccagctcatgtggatcgtgggctctcgttgataacgtttgctgcccatactactgtctctcggataatgaatccgagtcctgcacgagcagctgtaccggcggctgcggcagtcctgattcctccatgtgcaagtccgggacgatgtggggagagcaacacaccgtaacttccaacgaggactggcattacagccgctcaacacactttggtctgaccagcggtggcgcctgcgggttcggtctgtacggcctctgcaccaagaacagtgtcaccgcgagctggacagacccaatgctgggctctacctgcgacgccttctgcaccgcgtatccgctcctctgcaaagaccccgctaacgtcactctccgcgggaactttgctgccccgaacggagactactacactcagttctggccttccctggctgcatccggcaatcccgacaactacctctcttgcggggagtgtttcgaggtcatccgcaccaagcccgacgggacagactacgccgtcggcgagagcggatataccgaccccatagtcctcgaggtagtagacagctgtccctgcaatgccaattcaaaatggtgctgtaagcggccccccccccccccctttttttccccgccttccaacggacaaaatctcacaagaccaggcggcagcggcgcagaccactgcggcgaaatcgacttcaagtacggctgtcctctgccggaaggatcccatcacatggacctctccgatattgccatgggccgactccagggaaacggcagtctcgccgacggtgtgattcccatccgctaccggcgtgtcccctgtcccaagccggggaacatctacatctggcttcatgatggggcgggaccgtattattttgcgctgagcgcggtcaataccaacggccccggctccgtaatcagtatcgaagtccaggctggtggctccgggccatgggttgccctcgagcacgatccgaactacaccagtagccggccgcaggagcggtatggctcttgggtcctcccgcagggcaagggacccattactgtgcctgtttcgatgaggctgacggcgcccaatgggcagcaggtggttaaggagggcgccattaccagctataccccgccggcgactgcggtcgagggcttttggtatattgatctgggagtgcagttcacccagcaaccgggtaccagcacccccgaggtccatcccaagttgacaacctacaagtgtacaaagtccggggggtgcgtggcccaggacacctcggtggtccttgactggaactaccgctggatgcacgacgcaaactacaactcgtgcaccgtcaacggcggcgtcaacaccacgctctgccctgacgaggcgacctgtggcaagaactgcttcatcgagggcgtcgactacgccgcctcgggcgtcacgacctcgggcagcagcctcaccatgaaccagtacatgcccagcagctctggcggctacagcagcgtctctcctcggctgtatctcctggactctgacggtgagtacgtgatgctgaagctcaacggccaggagctgagcttcgacgtcgacctctctgctctgccgtgtggagagaacggctcgctctacctgtctcagatggacgagaacgggggcgccaaccagtataacacggccggtgccaactacgggagcggctactgcgatgctcagtgccccgtccagacatggaggaacggcaccctcaacactagccaccagggcttctgctgcaacgagatggatatcctggagggcaactcgagggcgaatgccttgacccctcactcttgcacggccacggcctgcgactctgccggttgcggcttcaacccctatggcagcggctacaaaagctactacggccccggagataccgttgacacctccaagaccttcaccatcatcacccagttcaacacggacaacggctcgccctcgggcaaccttgtgagcatcacccgcaagtaccagcaaaacggcgtcgacatccccagcgcccagcccggcggcgacaccatctcgtcctgcccgtccgcctcagcctacggcggcctcgccaccatgggcaaggccctgagcagcggcatggtgctcgtgttcagcatttggaacgacaacagccagtacatgaactggctcgacagcggcaacgccggcccctgcagcagcaccgagggcaacccatccaacatcctggccaacaaccccaacacgcacgtcgtcttctccaacatccgctggggagacattgggtctactacgaactcgactgcgcccccgcccccgcctgcgtccagcacgacgttttcgactacacggaggagctcgacgacttcgagcagcccgagc

SEQ ID NO: 98 - protein, 883 aa, artificial sequence
  Synthetic Construct
QSSCVSAWGQCGGISYTGSTCCQSGNTCAEINSYYYQCIPATAVSTSTTTVTSPSSSGSSSANTSGYTTTTVLPSPTATQNPYPPANASSCGSWALVDNVCCPYYCLSDNESESCTSSCTGGCGSPDSSMCKSGTMWGEQHTVTSNEDWHYSRSTHFGLTSGGACGFGLYGLCTKNSVTASWTDPMLGSTCDAFCTAYPLLCKDPANVTLRGNFAAPNGDYYTQFWPSLAASGNPDNYLSCGECFEVIRTKPDGTDYAVGESGYTDPIVLEVVDSCPCNANSKWCCKRPPPPPFFSPPSNGQNLTRPGGSGADHCGEIDFKYGCPLPEGSHHMDLSDIAMGRLQGNGSLADGVIPIRYRRVPCPKPGNIYIWLHDGAGPYYFALSAVNTNGPGSVISIEVQAGGSGPWVALEHDPNYTSSRPQERYGSWVLPQGKGPITVPVSMRLTAPNGQQVVKEGAITSYTPPATAVEGFWYIDLGVQFTQQPGTSTPEVHPKLTTYKCTKSGGCVAQDTSVVLDWNYRWMHDANYNSCTVNGGVNTTLCPDEATCGKNCFIEGVDYAASGVTTSGSSLTMNQYMPSSSGGYSSVSPRLYLLDSDGEYVMLKLNGQELSFDVDLSALPCGENGSLYLSQMDENGGANQYNTAGANYGSGYCDAQCPVQTWRNGTLNTSHQGFCCNEMDILEGNSRANALTPHSCTATACDSAGCGFNPYGSGYKSYYGPGDTVDTSKTFTIITQFNTDNGSPSGNLVSITRKYQQNGVDIPSAQPGGDTISSCPSASAYGGLATMGKALSSGMVLVFSIWNDNSQYMNWLDSGNAGPCSSTEGNPSNILANNPNTHVVFSNIRWGDIGSTTNSTAPPPPPASSTTFSTTRRSSTTSSSPS

SEQ ID NO: 99 - DNA, 2787 bp, artificial sequence
  synthetic fusion protein
  CDS (1)..(2787)
cagagcagctgcgtctcggcttggggtcaatgtggcggtatttcttataccgggtctacctgctgtcagagtgggaatacctgcgccgagattaactcgtactactaccagtgcataccagcaacagctgtgagtacttcaactaccacagtgacatctccctctagctctggttcgtcttctgccaacacgtcaggttatacaacgacgactgtcttgcccagtcccacggcaacacagaacccttatcctccggccaatgccagctcatgtggatcgtgggctctcgttgataacgtttgctgcccatactactgtctctcggataatgaatccgagtcctgcacgagcagctgtaccggcggctgcggcagtcctgattcctccatgtgcaagtccgggacgatgtggggagagcaacacaccgtaacttccaacgaggactggcattacagccgctcaacacactttggtctgaccagcggtggcgcctgcgggttcggtctgtacggcctctgcaccaagaacagtgtcaccgcgagctggacagacccaatgctgggctctacctgcgacgccttctgcaccgcgtatccgctcctctgcaaagaccccgctaacgtcactctccgcgggaactttgctgccccgaacggagactactacactcagttctggccttccctggctgcatccggcaatcccgacaactacctctcttgcggggagtgtttcgaggtcatccgcaccaagcccgacgggacagactacgccgtcggcgagagcggatataccgaccccatagtcctcgaggtagtagacagctgtccctgcaatgccaattcaaaatggtgctgtaagcggccccccccccccccctttttttccccgccttccaacggacaaaatctcacaagaccaggcggcagcggcgcagaccactgcggcgaaatcgacttcaagtacggctgtcctctgccggaaggatcccatcacatggacctctccgatattgccatgggccgactccagggaaacggcagtctcgccgacggtgtgattcccatccgctaccggcgtgtcccctgtcccaagccggggaacatctacatctggcttcatgatggggcgggaccgtattattttgcgctgagcgcggtcaataccaacggccccggctccgtaatcagtatcgaagtccaggctggtggctccgggccatgggttgccctcgagcacgatccgaactacaccagtagccggccgcaggagcggtatggctcttgggtcctcccgcagggcaagggacccattactgtgcctgtttcgatgaggctgacggcgcccaatgggcagcaggtggttaaggagggcgccattaccagctataccccgccggcgactgcggtcgagggcttttggtatattgatctgggagtgcagttcaccggctcgacttactccagtggatcttcttcggggtcggggtctagctccagctcgagttcgactaccactaaggccacttcgacgaccttgaagactacctcgaccaccagcagtggaagcagttcgacatcggcggcgcagcaaccgggtaccagcacccccgaggtccatcccaagttgacaacctacaagtgtacaaagtccggggggtgcgtggcccaggacacctcggtggtccttgactggaactaccgctggatgcacgacgcaaactacaactcgtgcaccgtcaacggcggcgtcaacaccacgctctgccctgacgaggcgacctgtggcaagaactgcttcatcgagggcgtcgactacgccgcctcgggcgtcacgacctcgggcagcagcctcaccatgaaccagtacatgcccagcagctctggcggctacagcagcgtctctcctcggctgtatctcctggactctgacggtgagtacgtgatgctgaagctcaacggccaggagctgagcttcgacgtcgacctctctgctctgccgtgtggagagaacggctcgctctacctgtctcagatggacgagaacgggggcgccaaccagtataacacggccggtgccaactacgggagcggctactgcgatgctcagtgccccgtccagacatggaggaacggcaccctcaacactagccaccagggcttctgctgcaacgagatggatatcctggagggcaactcgagggcgaatgccttgacccctcactcttgcacggccacggcctgcgactctgccggttgcggcttcaacccctatggcagcggctacaaaagctactacggccccggagataccgttgacacctccaagaccttcaccatcatcacccagttcaacacggacaacggctcgccctcgggcaaccttgtgagcatcacccgcaagtaccagcaaaacggcgtcgacatccccagcgcccagcccggcggcgacaccatctcgtcctgcccgtccgcctcagcctacggcggcctcgccaccatgggcaaggccctgagcagcggcatggtgctcgtgttcagcatttggaacgacaacagccagtacatgaactggctcgacagcggcaacgccggcccctgcagcagcaccgagggcaacccatccaacatcctggccaacaaccccaacacgcacgtcgtcttctccaacatccgctggggagacattgggtctactacgaactcgactgcgcccccgcccccgcctgcgtccagcacgacgttttcgactacacggaggagctcgacgacttcgagcagcccgagc

SEQ ID NO: 100 - protein, 929 aa, artificial sequence
  Synthetic Construct
QSSCVSAWGQCGGISYTGSTCCQSGNTCAEINSYYYQCIPATAVSTSTTTVTSPSSSGSSSANTSGYTTTTVLPSPTATQNPYPPANASSCGSWALVDNVCCPYYCLSDNESESCTSSCTGGCGSPDSSMCKSGTMWGEQHTVTSNEDWHYSRSTHFGLTSGGACGFGLYGLCTKNSVTASWTDPMLGSTCDAFCTAYPLLCKDPANVTLRGNFAAPNGDYYTQFWPSLAASGNPDNYLSCGECFEVIRTKPDGTDYAVGESGYTDPIVLEVVDSCPCNANSKWCCKRPPPPPFFSPPSNGQNLTRPGGSGADHCGEIDFKYGCPLPEGSHHMDLSDIAMGRLQGNGSLADGVIPIRYRRVPCPKPGNIYIWLHDGAGPYYFALSAVNTNGPGSVISIEVQAGGSGPWVALEHDPNYTSSRPQERYGSWVLPQGKGPITVPVSMRLTAPNGQQVVKEGAITSYTPPATAVEGFWYIDLGVQFTGSTYSSGSSSGSGSSSSSSSTTTKATSTTLKTTSTTSSGSSSTSAAQQPGTSTPEVHPKLTTYKCTKSGGCVAQDTSVVLDWNYRWMHDANYNSCTVNGGVNTTLCPDEATCGKNCFIEGVDYAASGVTTSGSSLTMNQYMPSSSGGYSSVSPRLYLLDSDGEYVMLKLNGQELSFDVDLSALPCGENGSLYLSQMDENGGANQYNTAGANYGSGYCDAQCPVQTWRNGTLNTSHQGFCCNEMDILEGNSRANALTPHSCTATACDSAGCGFNPYGSGYKSYYGPGDTVDTSKTFTIITQFNTDNGSPSGNLVSITRKYQQNGVDIPSAQPGGDTISSCPSASAYGGLATMGKALSSGMVLVFSIWNDNSQYMNWLDSGNAGPCSSTEGNPSNILANNPNTHVVFSNIRWGDIGSTTNSTAPPPPPASSTTFSTTRRSSTTSSSPS

SEQ ID NO: 101 - DNA, 54 bp, Trichoderma reesei
  CDS (1)..(54)
atggctggtaagcttatcctcgtggctctagcaagccttgtatcactctctatt

SEQ ID NO: 102 - protein, 18 aa, Trichoderma reesei
MAGKLILVALASLVSLSI

SEQ ID NO: 103 - DNA, 51 bp, Trichoderma reesei
  CDS (1)..(51)
atgactcttctatttggtatatttcttgcccggcttgcggtggctgccgcc

SEQ ID NO: 104 - protein, 17 aa, Trichoderma reesei
MTLLFGIFLARLAVAAA

SEQ ID NO: 105 - DNA, 27 bp, artificial sequence
  synthetic F1 forwerd primer
gataccgcggatgaagcaattctctgc

SEQ ID NO: 106 - DNA, 33 bp, artificial sequence
  synthetic F2 primer
gtgcagtttagcaatgcctccacgcaaggcatc

SEQ ID NO: 107 - DNA, 51 bp, artificial sequence
  synthetic R1 reverse primer
aatacatatgttagtggtggtggtggtggtgccaagtacaagctccgctcg

SEQ ID NO: 108 - DNA, 28 bp, artificial sequence
  synthetic F3 forward primer
atatccgcggatggctggtaagcttatc

SEQ ID NO: 109 - DNA, 36 bp, artificial sequence
  synthetic R2 reverse primer
gatgccttgcgtggaggcattctggctaaactgcac
